(19) United States
(12) Patent Application Publication
(10) Pub. No.: US 2025/0213720 A1
(43) Pub. Date: Jul. 3, 2025

(54) MODIFIED RNAi AGENTS

(71) Applicant: Alnylam Pharmaceuticals, Inc., Cambridge, MA (US)

(72) Inventors: Kallanthottathil G. RAJEEV, Cambridge, MA (US); Tracy ZIMMERMANN, Cambridge, MA (US); Muthiah MANOHARAN, Cambridge, MA (US); Martin MAIER, Cambridge, MA (US); Satyanarayana KUCHIMANCHI, Cambridge, MA (US); Klaus CHARISSE, Cambridge, MA (US)

(21) Appl. No.: 19/085,209

(22) Filed: Mar. 20, 2025

Related U.S. Application Data
(63) Continuation of application No. 17/848,850, filed on Jun. 24, 2022, now Pat. No. 12,290,573.
Application No. 17/848,850 is a continuation of application No. 16/850,555, filed on Apr. 16, 2020, now Pat. No. 11,406,716.
Application No. 16/850,555 is a continuation of application No. 16/165,343, filed on Oct. 19, 2018, now Pat. No. 10,668,170.
Application No. 16/165,343 is a continuation of application No. 15/706,389, filed on Sep. 15, 2017, now abandoned.
Application No. 15/706,389 is a continuation of application No. 14/358,009, filed on May 13, 2014, now Pat. No. 9,796,974.
(60) Provisional application No. 61/561,710, filed on Nov. 18, 2011.

(51) Int. Cl. A61K 48/00; C07H 21/02; C12N 15/113; C12N 15/85

(52) U.S. Cl. CPC A61K 48/00; C07H 21/02; C12N 15/113; C12N 15/85; C12N 2310/315; C12N 2310/321; C12N 2310/322; C12N 2310/343; C12N 2310/346; C12N 2320/51

(57) ABSTRACT

One aspect of the present invention relates to double-stranded RNAi (dsRNA) duplex agent capable of inhibiting the expression of a target gene. The dsRNA duplex comprises one or more motifs of three identical modifications on three consecutive nucleotides in one or both strand, particularly at or near the cleavage site of the strand. Other aspects of the invention relates to pharmaceutical compositions comprising these dsRNA agents suitable for therapeutic use, and methods of inhibiting the expression of a target gene by administering these dsRNA agents, e.g., for the treatment of various disease conditions.

### RELATED APPLICATION

[0001] This application is a continuation of U.S. patent application Ser. No. 17/848,850, filed Jun. 24, 2022, which is a continuation of U.S. patent application Ser. No. 16/850,555, filed Apr. 16, 2020, now U.S. Pat. No. 11,406,716, which is a continuation of U.S. patent application Ser. No. 16/165,343, filed Oct. 19, 2018, now U.S. Pat. No. 10,688,170, which is a continuation of U.S. patent application Ser. No. 15/706,389, filed Sep. 15, 2017, which is a continuation of U.S. patent application Ser. No. 14/358,009, filed May 13, 2014, now U.S. Pat. No. 9,796,974, which claims priority to PCT Application No. PCT/US2012/065601, filed Nov. 16, 2012, which claims benefit of priority to U.S. Provisional Application No. 61/561,710, filed on Nov. 18, 2011; all of which are herein incorporated by reference in their entirety.

### SEQUENCE LISTING

[0002] The instant application contains a Sequence Listing which has been submitted in XML format and is hereby incorporated by reference in its entirety. Said XML copy, created on Mar. 19, 2025, is named 29520_1087-US-CON5_SL.xml and is 16,209,222 bytes in size.

### FIELD OF THE INVENTION

[0003] The invention relates to RNAi duplex agents having particular motifs that are advantageous for inhibition of target gene expression, as well as RNAi compositions suitable for therapeutic use. Additionally, the invention provides methods of inhibiting the expression of a target gene by administering these RNAi duplex agents, e.g., for the treatment of various diseases.

### BACKGROUND

[0004] RNA interference or “RNAi” is a term initially coined by Fire and co-workers to describe the observation that double-stranded RNAi (dsRNA) can block gene expression (Fire et al. (1998) Nature 391, 806-811; Elbashir et al. (2001) Genes Dev. 15, 188-200). Short dsRNA directs gene-specific, post-transcriptional silencing in many organisms, including vertebrates, and has provided a new tool for studying gene function. RNAi is mediated by RNA-induced silencing complex (RISC), a sequence-specific, multi-component nuclease that destroys messenger RNAs homologous to the silencing trigger. RISC is known to contain short RNAs (approximately 22 nucleotides) derived from the double-stranded RNA trigger, but the protein components of this activity remained unknown.

[0005] Double-stranded RNA (dsRNA) molecules with good gene-silencing properties are needed for drug development based on RNA interference (RNAi). An initial step in RNAi is the activation of the RNA induced silencing complex (RISC), which requires degradation of the sense strand of the dsRNA duplex. Sense strand was known to act as the first RISC substrate that is cleaved by Argonaute 2 in the middle of the duplex region. Immediately after the cleaved 5′-end and 3′-end fragments of the sense strand are removed from the endonuclease Ago2, the RISC becomes activated by the antisense strand (Rand et al. (2005) Cell 123, 621).

[0006] It was believed that when the cleavage of the sense strand is inhibited, the endonucleolytic cleavage of target mRNA is impaired (Leuschner et al. (2006) EMBO Rep., 7, 314; Rand et al. (2005) Cell 123, 621; Schwarz et al. (2004) Curr. Biol. 14, 787). Leuschner et al. showed that incorporation of a 2′-O-Me ribose to the Ago2 cleavage site in the sense strand inhibits RNAi in HeLa cells (Leuschner et al. (2006) EMBO Rep., 7, 314). A similar effect was observed with phosphorothioate modifications, showing that cleavage of the sense strand was required for efficient RNAi also in mammals.

[0007] Morrissey et al. used a siRNA duplex containing 2′-F modified residues, among other sites and modifications, also at the Ago2 cleavage site, and obtained compatible silencing compared to the unmodified siRNAs (Morrissey et al. (2005) Hepatology 41, 1349). However, Morrissey's modification is not motif specific, e.g., one modification includes 2′-F modifications on all pyrimidines on both sense and antisense strands as long as pyrimidine residue is present, without any selectivity; and hence it is uncertain, based on these teachings, if specific motif modification at the cleavage site of sense strand can have any actual effect on gene silencing activity.

[0008] Muhonen et al. used a siRNA duplex containing two 2′-F modified residues at the Ago2 cleavage site on the sense or antisense strand and found it was tolerated (Muhonen et al. (2007) Chemistry & Biodiversity 4, 858-873). However, Muhonen's modification is also sequence specific, e.g., for each particular strand, Muhonen only modifies either all pyrimidines or all purines, without any selectivity.

[0009] Choung et al. used a siRNA duplex containing alternative modifications by 2′-OMe or various combinations of 2′-F, 2′-OMe and phosphorothioate modifications to stabilize siRNA in serum to Sur10058 (Choung et al. (2006) Biochemical and Biophysical Research Communications 342, 919-927). Choung suggested that the residues at the cleavage site of the antisense strand should not be modified with 2′-OMe in order to increase the stability of the siRNA.

[0010] There is thus an ongoing need for iRNA duplex agents to improve the gene silencing efficacy of siRNA gene therapeutics. This invention is directed to that need.

### SUMMARY

[0011] This invention provides effective nucleotide or chemical motifs for dsRNA agents optionally conjugated to at least one ligand, which are advantageous for inhibition of target gene expression, as well as RNAi compositions suitable for therapeutic use.

[0012] The inventors surprisingly discovered that introducing one or more motifs of three identical modifications on three consecutive nucleotides at or near the cleavage site of a dsRNA agent that is comprised of modified sense and antisense strands enhances the gene silencing activity of the dsRNA agent.

[0013] In one aspect, the invention relates to a double-stranded RNAi (dsRNA) agent capable of inhibiting the expression of a target gene. The dsRNA agent comprises a sense strand and an antisense strand, each strand having 14 to 30 nucleotides. The dsRNA duplex is represented by formula (III):

sense: 5′ nₚ-Nₐ-(XXX)ᵢ-N_{b}-YYY-N_{b}-(ZZZ)ⱼ-Nₐ-n_{q} 3′

antisense: 3′ nₚ′-Nₐ′-(X′X′X′)ₖ-N_{b}′-Y′Y′Y′-N_{b}′-(Z′Z′Z′)ₗ-Nₐ′-n_{q}′ 5′ (III),

In formula (III), i, j, k, and l are each independently 0 or 1; p and q are each independently 0-6; n represents a nucleotide; each Nₐ and Nₐ′ independently represents an oligonucleotide sequence comprising 0-25 nucleotides which are either modified or unmodified or combinations thereof, each sequence comprising at least two differently modified nucleotides; each N_{b} and N_{b}′ independently represents an oligonucleotide sequence comprising 0-10 nucleotides which are either modified or unmodified or combinations thereof; each nₚ and n_{q} independently represents an overhang nucleotide sequence comprising 0-6 nucleotides; and XXX, YYY, ZZZ, X′X′X′, Y′Y′Y′, and Z′Z′Z′ each independently represent one motif of three identical modifications on three consecutive nucleotides; wherein the modifications on Nb is different than the modification on Y and the modifications on Nb′ is different than the modification on Y′. At least one of the Y nucleotides forms a base pair with its complementary Y′ nucleotides, and wherein the modification on the Y nucleotide is different than the modification on the Y′ nucleotide.

[0014] Each nₚ and n_{q} independently represents an overhang nucleotide sequence comprising 0-6 nucleotides; each n and n′ represents an overhang nucleotide; and p and q are each independently 0-6.

[0015] In another aspect, the invention relates to a dsRNA agent capable of inhibiting the expression of a target gene. The dsRNA agent comprises a sense strand and an antisense strand, each strand having 14 to 30 nucleotides. The sense strand contains at least two motifs of three identical modifications on three consecutive nucleotides, where at least one of the motifs occurs at or near the cleavage site within the strand and at least one of the motifs occurs at another portion of the strand that is separated from the motif at the cleavage site by at least one nucleotide. The antisense strand contains at least one motif of three identical modifications on three consecutive nucleotides, where at least one of the motifs occurs at or near the cleavage site within the strand and at least one of the motifs occurs at another portion of the strand that is separated from the motif at or near cleavage site by at least one nucleotide. The modification in the motif occurring at or near the cleavage site in the sense strand is different than the modification in the motif occurring at or near the cleavage site in the antisense strand.

[0016] In another aspect, the invention relates to a dsRNA agent capable of inhibiting the expression of a target gene. The dsRNA agent comprises a sense strand and an antisense strand, each strand having 14 to 30 nucleotides. The sense strand contains at least one motif of three 2′-F modifications on three consecutive nucleotides, where at least one of the motifs occurs at or near the cleavage site in the strand. The antisense strand contains at least one motif of three 2′-O-methyl modifications on three consecutive nucleotides at or near the cleavage site.

[0017] In another aspect, the invention relates to a dsRNA agent capable of inhibiting the expression of a target gene. The dsRNA agent comprises a sense strand and an antisense strand, each strand having 14 to 30 nucleotides. The sense strand contains at least one motif of three 2′-F modifications on three consecutive nucleotides at positions 9,10,11 from the 5′end. The antisense strand contains at least one motif of three 2′-O-methyl modifications on three consecutive nucleotides at positions 11,12,13 from the 5′end.

[0018] In another aspect, the invention further provides a method for delivering the dsRNA to a specific target in a subject by subcutaneous or intravenous administration.

### DETAILED DESCRIPTION

[0019] A superior result may be obtained by introducing one or more motifs of three identical modifications on three consecutive nucleotides into a sense strand and/or antisense strand of a dsRNA agent, particularly at or near the cleavage site. The sense strand and antisense strand of the dsRNA agent may otherwise be completely modified. The introduction of these motifs interrupts the modification pattern, if present, of the sense and/or antisense strand. The dsRNA agent optionally conjugates with a GalNAc derivative ligand, for instance on the sense strand. The resulting dsRNA agents present superior gene silencing activity.

[0020] The inventors surprisingly discovered that having one or more motifs of three identical modifications on three consecutive nucleotides at or near the cleavage site of at least one strand of a dsRNA agent superiorly enhanced the gene silencing activity of the dsRNA agent.

[0021] Accordingly, the invention provides a double-stranded RNAi (dsRNA) agent capable of inhibiting the expression of a target gene. The dsRNA agent comprises a sense strand and an antisense strand. Each strand of the dsRNA agent can range from 12-30 nucleotides in length. For example, each strand can be between 14-30 nucleotides in length, 17-30 nucleotides in length, 25-30 nucleotides in length, 27-30 nucleotides in length, 17-23 nucleotides in length, 17-21 nucleotides in length, 17-19 nucleotides in length, 19-25 nucleotides in length, 19-23 nucleotides in length, 19-21 nucleotides in length, 21-25 nucleotides in length, or 21-23 nucleotides in length.

[0022] The sense strand and antisense strand typically form a duplex dsRNA. The duplex region of a dsRNA agent may be 12-30 nucleotide pairs in length. For example, the duplex region can be between 14-30 nucleotide pairs in length, 17-30 nucleotide pairs in length, 25-30 nucleotides in length, 27-30 nucleotide pairs in length, 17-23 nucleotide pairs in length, 17-21 nucleotide pairs in length, 17-19 nucleotide pairs in length, 19-25 nucleotide pairs in length, 19-23 nucleotide pairs in length, 19-21 nucleotide pairs in length, 21-25 nucleotide pairs in length, or 21-23 nucleotide pairs in length. In another example, the duplex region is selected from 15, 16, 17, 18, 19, 20, 21, 22, 23, 24, 25, 26, and 27.

[0023] In one embodiment, the dsRNA agent of the invention comprises may contain one or more overhang regions and/or capping groups of dsRNA agent at the 3′-end, or 5′-end or both ends of a strand. The overhang can be 1-6 nucleotides in length, for instance 2-6 nucleotides in length, 1-5 nucleotides in length, 2-5 nucleotides in length, 1-4 nucleotides in length, 2-4 nucleotides in length, 1-3 nucleotides in length, 2-3 nucleotides in length, or 1-2 nucleotides in length. The overhangs can be the result of one strand being longer than the other, or the result of two strands of the same length being staggered. The overhang can form a mismatch with the target mRNA or it can be complementary to the gene sequences being targeted or can be other sequence. The first and second strands can also be joined, e.g., by additional bases to form a hairpin, or by other non-base linkers.

[0024] In one embodiment, the nucleotides in the overhang region of the dsRNA agent of the invention can each independently be a modified or unmodified nucleotide including, but no limited to 2′-sugar modified, such as, 2-F 2′-Omethyl, thymidine (T), 2′-O-methoxyethyl-5-methyluridine (Teo), 2′-O-methoxyethyladenosine (Aeo), 2′-O-methoxyethyl-5-methylcytidine (m5Ceo), and any combinations thereof. For example, TT can be an overhang sequence for either end on either strand. The overhang can form a mismatch with the target mRNA or it can be complementary to the gene sequences being targeted or can be other sequence.

[0025] The 5′- or 3′-overhangs at the sense strand, antisense strand or both strands of the dsRNA agent of the invention may be phosphorylated. In some embodiments, the overhang region contains two nucleotides having a phosphorothioate between the two nucleotides, where the two nucleotides can be the same or different. In one embodiment, the overhang is present at the 3′-end of the sense strand, antisense strand or both strands. In one embodiment, this 3′-overhang is present in the antisense strand. In one embodiment, this 3′-overhang is present in the sense strand.

[0026] The dsRNA agent of the invention comprises only single overhang, which can strengthen the interference activity of the dsRNA, without affecting its overall stability. For example, the single-stranded overhang is located at the 3′-terminal end of the sense strand or, alternatively, at the 3′-terminal end of the antisense strand. The dsRNA may also have a blunt end, located at the 5′-end of the antisense strand (or the 3′-end of the sense strand) or vice versa. Generally, the antisense strand of the dsRNA has a nucleotide overhang at the 3′-end, and the 5′-end is blunt. While not bound by theory, the asymmetric blunt end at the 5′-end of the antisense strand and 3′-end overhang of the antisense strand favor the guide strand loading into RISC process.

[0027] In one embodiment, the dsRNA agent of the invention may also have two blunt ends, at both ends of the dsRNA duplex.

[0028] In one embodiment, the dsRNA agent of the invention is a double ended bluntmer of 19 nt in length, wherein the sense strand contains at least one motif of three 2′-F modifications on three consecutive nucleotides at positions 7,8,9 from the 5′end. The antisense strand contains at least one motif of three 2′-O-methyl modifications on three consecutive nucleotides at positions 11,12,13 from the 5′end.

[0029] In one embodiment, the dsRNA agent of the invention is a double ended bluntmer of 20 nt in length, wherein the sense strand contains at least one motif of three 2′-F modifications on three consecutive nucleotides at positions 8,9,10 from the 5′end. The antisense strand contains at least one motif of three 2′-O-methyl modifications on three consecutive nucleotides at positions 11,12,13 from the 5′end.

[0030] In one embodiment, the dsRNA agent of the invention is a double ended bluntmer of 21 nt in length, wherein the sense strand contains at least one motif of three 2′-F modifications on three consecutive nucleotides at positions 9,10,11 from the 5′end. The antisense strand contains at least one motif of three 2′-O-methyl modifications on three consecutive nucleotides at positions 11,12,13 from the 5′end.

[0031] In one embodiment, the dsRNA agent of the invention comprises a 21 nucleotides (nt) sense strand and a 23 nucleotides (nt) antisense, wherein the sense strand contains at least one motif of three 2′-F modifications on three consecutive nucleotides at positions 9,10,11 from the 5′end; the antisense strand contains at least one motif of three 2′-O-methyl modifications on three consecutive nucleotides at positions 11,12,13 from the 5′end, wherein one end of the dsRNA is blunt, while the other end is comprises a 2 nt overhang. Preferably, the 2 nt overhang is at the 3′-end of the antisense. Optionally, the dsRNA further comprises a ligand (preferably GalNAc₃).

[0032] In one embodiment, the dsRNA agent of the invention comprising a sense and antisense strands, wherein: the sense strand is 25-30 nucleotide residues in length, wherein starting from the 5′ terminal nucleotide (position 1) positions 1 to 23 of said first strand comprise at least 8 ribonucleotides; antisense strand is 36-66 nucleotide residues in length and, starting from the 3′ terminal nucleotide, comprises at least 8 ribonucleotides in the positions paired with positions 1-23 of sense strand to form a duplex; wherein at least the 3′ terminal nucleotide of antisense strand is unpaired with sense strand, and up to 6 consecutive 3′ terminal nucleotides are unpaired with sense strand, thereby forming a 3′ single stranded overhang of 1-6 nucleotides; wherein the 5′ terminus of antisense strand comprises from 10-30 consecutive nucleotides which are unpaired with sense strand, thereby forming a 10-30 nucleotide single stranded 5′ overhang; wherein at least the sense strand 5′ terminal and 3′ terminal nucleotides are base paired with nucleotides of antisense strand when sense and antisense strands are aligned for maximum complementarity, thereby forming a substantially duplexed region between sense and antisense strands; and antisense strand is sufficiently complementary to a target RNA along at least 19 ribonucleotides of antisense strand length to reduce target gene expression when said double stranded nucleic acid is introduced into a mammalian cell; and wherein the sense strand contains at least one motif of three 2′-F modifications on three consecutive nucleotides, where at least one of the motifs occurs at or near the cleavage site. The antisense strand contains at least one motif of three 2′-O-methyl modifications on three consecutive nucleotides at or near the cleavage site.

[0033] In one embodiment, the dsRNA agent of the invention comprising a sense and antisense strands, wherein said dsRNA agent comprises a first strand having a length which is at least 25 and at most 29 nucleotides and a second strand having a length which is at most 30 nucleotides with at least one motif of three 2′-O-methyl modifications on three consecutive nucleotides at position 11,12,13 from the 5′ end; wherein said 3′ end of said first strand and said 5′ end of said second strand form a blunt end and said second strand is 1-4 nucleotides longer at its 3′ end than the first strand, wherein the duplex region region which is at least 25 nucleotides in length, and said second strand is sufficiently complementary to a target mRNA along at least 19 nt of said second strand length to reduce target gene expression when said dsRNA agent is introduced into a mammalian cell, and wherein dicer cleavage of said dsRNA preferentially results in an siRNA comprising said 3′ end of said second strand, thereby reducing expression of the target gene in the mammal. Optionally, the dsRNA agent further comprises a ligand.

[0034] In one embodiment, the sense strand of the dsRNA agent contains at least one motif of three identical modifications on three consecutive nucleotides, where one of the motifs occurs at the cleavage site in the sense strand.

[0035] In one embodiment, the antisense strand of the dsRNA agent can also contain at least one motif of three identical modifications on three consecutive nucleotides, where one of the motifs occurs at or near the cleavage site in the antisense strand.

[0036] For dsRNA agent having a duplex region of 17-23 nt in length, the cleavage site of the antisense strand is typically around the 10, 11 and 12 positions from the 5′-end. Thus the motifs of three identical modifications may occur at the 9, 10, 11 positions; 10, 11, 12 positions; 11, 12, 13 positions; 12, 13, 14 positions; or 13, 14, 15 positions of the antisense strand, the count starting from the 1^{st} nucleotide from the 5′-end of the antisense strand, or, the count starting from the 1^{st} paired nucleotide within the duplex region from the 5′-end of the antisense strand. The cleavage site in the antisense strand may also change according to the length of the duplex region of the dsRNA from the 5′-end.

[0037] The sense strand of the dsRNA agent comprises at least one motif of three identical modifications on three consecutive nucleotides at the cleavage site of the strand; and the antisense strand may have at least one motif of three identical modifications on three consecutive nucleotides at or near the cleavage site of the strand. When the sense strand and the antisense strand form a dsRNA duplex, the sense strand and the antisense strand can be so aligned that one motif of the three nucleotides on the sense strand and one motif of the three nucleotides on the antisense strand have at least one nucleotide overlap, i.e., at least one of the three nucleotides of the motif in the sense strand forms a base pair with at least one of the three nucleotides of the motif in the antisense strand. Alternatively, at least two nucleotides of the motifs from both strands may overlap, or all three nucleotides may overlap.

[0038] In one embodiment, the sense strand of the dsRNA agent comprises more than one motif of three identical modifications on three consecutive nucleotides. The first motif should occur at or near the cleavage site of the strand and the other motifs may be a wing modifications. The term “wing modification” herein refers to a motif occurring at another portion of the strand that is separated from the motif at or near the cleavage site of the same strand. The wing modification is either adjacent to the first motif or is separated by at least one or more nucleotides. When the motifs are immediately adjacent to each other the chemistry of the motifs are distinct from each other and when the motifs are separated by one or more nucleotide the chemistries of the motifs can be the same or different. Two or more wing modifications may be present. For instance, when two wing modifications are present, the wing modifications may both occur at one end of the duplex region relative to the first motif which is at or near the cleavage site or each of the wing modifications may occur on either side of the first motif.

[0039] Like the sense strand, the antisense strand of the dsRNA agent comprises at least two motifs of three identical modifications on three consecutive nucleotides, with at least one of the motifs occurring at or near the cleavage site of the strand. This antisense strand may also contain one or more wing modifications in an alignment similar to the wing modifications that is present on the sense strand.

[0040] In one embodiment, the wing modification on the sense strand, antisense strand, or both strands of the dsRNA agent typically does not include the first one or two terminal nucleotides at the 3′-end, 5′-end or both ends of the strand.

[0041] In another embodiment, the wing modification on the sense strand, antisense strand, or both strands of the dsRNA agent typically does not include the first one or two paired nucleotides within the duplex region at the 3′-end, 5′-end or both ends of the strand.

[0042] When the sense strand and the antisense strand of the dsRNA agent each contain at least one wing modification, the wing modifications may fall on the same end of the duplex region, and have an overlap of one, two or three nucleotides.

[0043] When the sense strand and the antisense strand of the dsRNA agent each contain at least two wing modifications, the sense strand and the antisense strand can be aligned so that two wing modifications each from one strand fall on one end of the duplex region, having an overlap of one, two or three nucleotides; two modifications each from one strand fall on the other end of the duplex region, having an overlap of one, two or three nucleotides.

[0044] In one embodiment, every nucleotide in the sense strand and antisense strand of the dsRNA agent, including the nucleotides that are part of the motifs, may be modified. Each nucleotide may be modified with the same or different modification which can include one or more alteration of one or both of the non-linking phosphate oxygens and/or of one or more of the linking phosphate oxygens; alteration of a constituent of the ribose sugar, e.g., of the 2′ hydroxyl on the ribose sugar; wholesale replacement of the phosphate moiety with “dephospho” linkers; modification or replacement of a naturally occurring base; and replacement or modification of the ribose-phosphate backbone.

[0045] As nucleic acids are polymers of subunits, many of the modifications occur at a position which is repeated within a nucleic acid, e.g., a modification of a base, or a phosphate moiety, or a non-linking O of a phosphate moiety. In some cases the modification will occur at all of the subject positions in the nucleic acid but in many cases it will not. By way of example, a modification may only occur at a 3′ or 5′ terminal position, may only occur in a terminal region, e.g., at a position on a terminal nucleotide or in the last 2, 3, 4, 5, or 10 nucleotides of a strand. A modification may occur in a double strand region, a single strand region, or in both. A modification may occur only in the double strand region of a RNA or may only occur in a single strand region of a RNA. E.g., a phosphorothioate modification at a non-linking O position may only occur at one or both termini, may only occur in a terminal region, e.g., at a position on a terminal nucleotide or in the last 2, 3, 4, 5, or 10 nucleotides of a strand, or may occur in double strand and single strand regions, particularly at termini. The 5′ end or ends can be phosphorylated.

[0046] It may be possible, e.g., to enhance stability, to include particular bases in overhangs, or to include modified nucleotides or nucleotide surrogates, in single strand overhangs, e.g., in a 5′ or 3′ overhang, or in both. E.g., it can be desirable to include purine nucleotides in overhangs. In some embodiments all or some of the bases in a 3′ or 5′ overhang may be modified, e.g., with a modification described herein. Modifications can include, e.g., the use of modifications at the 2′ position of the ribose sugar with modifications that are known in the art, e.g., the use of deoxyribonucleotides, 2′-deoxy-2′-fluoro (2′-F) or 2′-O-methyl modified instead of the ribosugar of the nucleobase, and modifications in the phosphate group, e.g., phosphorothioate modifications. Overhangs need not be homologous with the target sequence.

[0047] In one embodiment, each residue of the sense strand and antisense strand is independently modified with LNA, HNA, CeNA, 2′-methoxyethyl, 2′-O-methyl, 2′-O-allyl, 2′-C-allyl, 2′-deoxy, or 2′-fluoro. The strands can contain more than one modification. In one embodiment, each residue of the sense strand and antisense strand is independently modified with 2′-O-methyl or 2′-fluoro.

[0048] At least two different modifications are typically present on the sense strand and antisense strand. Those two modifications may be the 2′-O-methyl or 2′-fluoro modifications, or others.

[0049] In one embodiment, the sense strand and antisense strand each contains two differently modified nucleotides selected from 2′-O-methyl or 2′-fluoro.

[0050] In one embodiment, each residue of the sense strand and antisense strand is independently modified with 2′-O-methyl nucleotide, 2′-deoxyfluoro nucleotide, 2′-O—N-methylacetamido (2′-O—NMA) nucleotide, a 2′-O-dimethylaminoethoxyethyl (2′-O-DMAEOE) nucleotide, 2′-O-aminopropyl (2′-O-AP) nucleotide, or 2′-ara-F nucleotide.

[0051] In one embodiment, the Nₐ and/or N_{b} comprise modifications of an alternating pattern. The term “alternating motif” or “alternative pattern” as used herein refers to a motif having one or more modifications, each modification occurring on alternating nucleotides of one strand. The alternating nucleotide may refer to one per every other nucleotide or one per every three nucleotides, or a similar pattern. For example, if A, B and C each represent one type of modification to the nucleotide, the alternating motif can be “ABABABABABAB . . . ,” “AABBAABBAABB . . . ,” “AABAABAABAAB . . . ,” “AAABAAABAAAB . . . ,” “AAABBBAAABBB . . . ,” or “ABCABCABCABC . . . ,” etc.

[0052] In one embodiment, the Nₐ′ and/or N_{b}′ comprise modifications of an alternating pattern. The term “alternating motif” or “alternative pattern” as used herein refers to a motif having one or more modifications, each modification occurring on alternating nucleotides of one strand. The alternating nucleotide may refer to one per every other nucleotide or one per every three nucleotides, or a similar pattern. For example, if A, B and C each represent one type of modification to the nucleotide, the alternating motif can be “ABABABABABAB . . . ,” “AABBAABBAABB . . . ,” “AABAABAABAAB . . . ,” “AAABAAABAAAB . . . ,” “AAABBBAAABBB . . . ,” or “ABCABCABCABC . . . ,” etc.

[0053] The type of modifications contained in the alternating motif may be the same or different. For example, if A, B, C, D each represent one type of modification on the nucleotide, the alternating pattern, i.e., modifications on every other nucleotide, may be the same, but each of the sense strand or antisense strand can be selected from several possibilities of modifications within the alternating motif such as “ABABAB . . . ”, “ACACAC . . . ” “BDBDBD . . . ” or “CDCDCD . . . ,” etc.

[0054] In one embodiment, the dsRNA agent of the invention comprises the modification pattern for the alternating motif on the sense strand relative to the modification pattern for the alternating motif on the antisense strand is shifted. The shift may be such that the modified group of nucleotides of the sense strand corresponds to a differently modified group of nucleotides of the antisense strand and vice versa. For example, the sense strand when paired with the antisense strand in the dsRNA duplex, the alternating motif in the sense strand may start with “ABABAB” from 5′-3′ of the strand and the alternating motif in the antisense strand may start with “BABABA” from 3′-5′ of the strand within the duplex region. As another example, the alternating motif in the sense strand may start with “AABBAABB” from 5′-3′ of the strand and the alternating motif in the antisense strand may start with “BBAABBAA” from 3′-5′ of the strand within the duplex region, so that there is a complete or partial shift of the modification patterns between the sense strand and the antisense strand.

[0055] In one embodiment, the dsRNA agent of the invention comprises the pattern of the alternating motif of 2′-O-methyl modification and 2′-F modification on the sense strand initially has a shift relative to the pattern of the alternating motif of 2′-O-methyl modification and 2′-F modification on the antisense strand initially, i.e., the 2′-O-methyl modified nucleotide on the sense strand base pairs with a 2′-F modified nucleotide on the antisense strand and vice versa. The 1 position of the sense strand may start with the 2′-F modification, and the 1 position of the antisense strand may start with the 2′-O-methyl modification.

[0056] The introduction of one or more motifs of three identical modifications on three consecutive nucleotides to the sense strand and/or antisense strand interrupts the initial modification pattern present in the sense strand and/or antisense strand. This interruption of the modification pattern of the sense and/or antisense strand by introducing one or more motifs of three identical modifications on three consecutive nucleotides to the sense and/or antisense strand surprisingly enhances the gene silencing activity to the target gene.

[0057] In one embodiment, when the motif of three identical modifications on three consecutive nucleotides is introduced to any of the strands, the modification of the nucleotide next to the motif is a different modification than the modification of the motif. For example, the portion of the sequence containing the motif is “ . . . NₐYYYN_{b} . . . ,” where “Y” represents the modification of the motif of three identical modifications on three consecutive nucleotide, and “Nₐ” and “N_{b}” represent a modification to the nucleotide next to the motif “YYY” that is different than the modification of Y, and where Nₐ and N_{b} can be the same or different modifications. Alternatively, Nₐ and/or N_{b} may be present or absent when there is a wing modification present.

[0058] The dsRNA agent of the invention may further comprise at least one phosphorothioate or methylphosphonate internucleotide linkage. The phosphorothioate or methylphosphonate internucleotide linkage modification may occur on any nucleotide of the sense strand or antisense strand or both in any position of the strand. For instance, the internucleotide linkage modification may occur on every nucleotide on the sense strand and/or antisense strand; each internucleotide linkage modification may occur in an alternating pattern on the sense strand or antisense strand; or the sense strand or antisense strand comprises both internucleotide linkage modifications in an alternating pattern. The alternating pattern of the internucleotide linkage modification on the sense strand may be the same or different from the antisense strand, and the alternating pattern of the internucleotide linkage modification on the sense strand may have a shift relative to the alternating pattern of the internucleotide linkage modification on the antisense strand.

[0059] In one embodiment, the dsRNA comprises the phosphorothioate or methylphosphonate internucleotide linkage modification in the overhang region. For example, the overhang region comprises two nucleotides having a phosphorothioate or methylphosphonate internucleotide linkage between the two nucleotides. Internucleotide linkage modifications also may be made to link the overhang nucleotides with the terminal paired nucleotides within duplex region. For example, at least 2, 3, 4, or all the overhang nucleotides may be linked through phosphorothioate or methylphosphonate internucleotide linkage, and optionally, there may be additional phosphorothioate or methylphosphonate internucleotide linkages linking the overhang nucleotide with a paired nucleotide that is next to the overhang nucleotide. For instance, there may be at least two phosphorothioate internucleotide linkages between the terminal three nucleotides, in which two of the three nucleotides are overhang nucleotides, and the third is a paired nucleotide next to the overhang nucleotide. Preferably, these terminal three nucleotides may be at the 3′-end of the antisense strand.

[0060] In one embodiment the sense strand of the dsRNA comprises 1-10 blocks of two to ten phosphorothioate or methylphosphonate internucleotide linkages separated by 1, 2, 3, 4, 5, 6, 7, 8, 9, 10, 11, 12, 13, 14, 15 or 16 phosphate internucleotide linkages, wherein one of the phosphorothioate or methylphosphonate internucleotide linkages is placed at any position in the oligonucleotide sequence and the said sense strand is paired with an antisense strand comprising any combination of phosphorothioate, methylphosphonate and phosphate internucleotide linkages or an antisense strand comprising either phosphorothioate or methylphophonate or phosphate linkage.

[0061] In one embodiment the antisense strand of the dsRNA comprises two blocks of two phosphorothioate or methylphosphonate internucleotide linkages separated by 1, 2, 3, 4, 5, 6, 7, 8, 9, 10, 11, 12, 13, 14, 15, 16, 17, or 18 phosphate internucleotide linkages, wherein one of the phosphorothioate or methylphosphonate internucleotide linkages is placed at any position in the oligonucleotide sequence and the said antisense strand is paired with a sense strand comprising any combination of phosphorothioate, methylphosphonate and phosphate internucleotide linkages or an antisense strand comprising either phosphorothioate or methylphophonate or phosphate linkage.

[0062] In one embodiment the antisense strand of the dsRNA comprises two blocks of three phosphorothioate or methylphosphonate internucleotide linkages separated by 1, 2, 3, 4, 5, 6, 7, 8, 9, 10, 11, 12, 13, 14, 15 or 16 phosphate internucleotide linkages, wherein one of the phosphorothioate or methylphosphonate internucleotide linkages is placed at any position in the oligonucleotide sequence and the said antisense strand is paired with a sense strand comprising any combination of phosphorothioate, methylphosphonate and phosphate internucleotide linkages or an antisense strand comprising either phosphorothioate or methylphophonate or phosphate linkage.

[0063] In one embodiment the antisense strand of the dsRNA comprises two blocks of four phosphorothioate or methylphosphonate internucleotide linkages separated by 1, 2, 3, 4, 5, 6, 7, 8, 9, 10, 11, 12, 13 or 14 phosphate internucleotide linkages, wherein one of the phosphorothioate or methylphosphonate internucleotide linkages is placed at any position in the oligonucleotide sequence and the said antisense strand is paired with a sense strand comprising any combination of phosphorothioate, methylphosphonate and phosphate internucleotide linkages or an antisense strand comprising either phosphorothioate or methylphophonate or phosphate linkage.

[0064] In one embodiment the antisense strand of the dsRNA comprises two blocks of five phosphorothioate or methylphosphonate internucleotide linkages separated by 1, 2, 3, 4, 5, 6, 7, 8, 9, 10, 11 or 12 phosphate internucleotide linkages, wherein one of the phosphorothioate or methylphosphonate internucleotide linkages is placed at any position in the oligonucleotide sequence and the said antisense strand is paired with a sense strand comprising any combination of phosphorothioate, methylphosphonate and phosphate internucleotide linkages or an antisense strand comprising either phosphorothioate or methylphophonate or phosphate linkage.

[0065] In one embodiment the antisense strand of the dsRNA comprises two blocks of six phosphorothioate or methylphosphonate internucleotide linkages separated by 1, 2, 3, 4, 5, 6, 7, 8, 9 or 10 phosphate internucleotide linkages, wherein one of the phosphorothioate or methylphosphonate internucleotide linkages is placed at any position in the oligonucleotide sequence and the said antisense strand is paired with a sense strand comprising any combination of phosphorothioate, methylphosphonate and phosphate internucleotide linkages or an antisense strand comprising either phosphorothioate or methylphophonate or phosphate linkage.

[0066] In one embodiment the antisense strand of the dsRNA comprises two blocks of seven phosphorothioate or methylphosphonate internucleotide linkages separated by 1, 2, 3, 4, 5, 6, 7 or 8 phosphate internucleotide linkages, wherein one of the phosphorothioate or methylphosphonate internucleotide linkages is placed at any position in the oligonucleotide sequence and the said antisense strand is paired with a sense strand comprising any combination of phosphorothioate, methylphosphonate and phosphate internucleotide linkages or an antisense strand comprising either phosphorothioate or methylphophonate or phosphate linkage.

[0067] In one embodiment the antisense strand of the dsRNA comprises two blocks of eight phosphorothioate or methylphosphonate internucleotide linkages separated by 1, 2, 3, 4, 5 or 6 phosphate internucleotide linkages, wherein one of the phosphorothioate or methylphosphonate internucleotide linkages is placed at any position in the oligonucleotide sequence and the said antisense strand is paired with a sense strand comprising any combination of phosphorothioate, methylphosphonate and phosphate internucleotide linkages or an antisense strand comprising either phosphorothioate or methylphophonate or phosphate linkage.

[0068] In one embodiment the antisense strand of the dsRNA comprises two blocks of nine phosphorothioate or methylphosphonate internucleotide linkages separated by 1, 2, 3 or 4 phosphate internucleotide linkages, wherein one of the phosphorothioate or methylphosphonate internucleotide linkages is placed at any position in the oligonucleotide sequence and the said antisense strand is paired with a sense strand comprising any combination of phosphorothioate, methylphosphonate and phosphate internucleotide linkages or an antisense strand comprising either phosphorothioate or methylphophonate or phosphate linkage.

[0069] In one embodiment, the dsRNA of the invention further comprises one or more phosphorothioate or methylphosphonate internucleotide linkage modification within 1-10 of the termini position(s) of the sense and/or antisense strand. For example, at least 2, 3, 4, 5, 6, 7, 8, 9 or 10 nucleotides may be linked through phosphorothioate or methylphosphonate internucleotide linkage at one end or both ends of the sense and/or antisense strand.

[0070] In one embodiment, the dsRNA of the invention further comprises one or more phosphorothioate or methylphosphonate internucleotide linkage modification within 1-10 of the internal region of the duplex of each of the sense and/or antisense strand. For example, at least 2, 3, 4, 5, 6, 7, 8, 9 or 10 nucleotides may be linked through phosphorothioate methylphosphonate internucleotide linkage at position 8-16 of the duplex region counting from the 5′-end of the sense strand; the dsRNA can optionally further comprise one or more phosphorothioate or methylphosphonate internucleotide linkage modification within 1-10 of the termini position(s).

[0071] In one embodiment, the dsRNA of the invention further comprises one to five phosphorothioate or methylphosphonate internucleotide linkage modification(s) within position 1-5 and one to five phosphorothioate or methylphosphonate internucleotide linkage modification(s) within position 18-23 of the sense strand (counting from the 5′-end), and one to five phosphorothioate or methylphosphonate internucleotide linkage modification at positions 1 and 2 and one to five within positions 18-23 of the antisense strand (counting from the 5′-end).

[0072] In one embodiment, the dsRNA of the invention further comprises one phosphorothioate internucleotide linkage modification within position 1-5 and one phosphorothioate or methylphosphonate internucleotide linkage modification within position 18-23 of the sense strand (counting from the 5′-end), and one phosphorothioate internucleotide linkage modification at positions 1 and 2 and two phosphorothioate or methylphosphonate internucleotide linkage modifications within positions 18-23 of the antisense strand (counting from the 5′-end).

[0073] In one embodiment, the dsRNA of the invention further comprises two phosphorothioate internucleotide linkage modifications within position 1-5 and one phosphorothioate internucleotide linkage modification within position 18-23 of the sense strand (counting from the 5′-end), and one phosphorothioate internucleotide linkage modification at positions 1 and 2 and two phosphorothioate internucleotide linkage modifications within positions 18-23 of the antisense strand (counting from the 5′-end).

[0074] In one embodiment, the dsRNA of the invention further comprises two phosphorothioate internucleotide linkage modifications within position 1-5 and two phosphorothioate internucleotide linkage modifications within position 18-23 of the sense strand (counting from the 5′-end), and one phosphorothioate internucleotide linkage modification at positions 1 and 2 and two phosphorothioate internucleotide linkage modifications within positions 18-23 of the antisense strand (counting from the 5′-end).

[0075] In one embodiment, the dsRNA of the invention further comprises two phosphorothioate internucleotide linkage modifications within position 1-5 and two phosphorothioate internucleotide linkage modifications within position 18-23 of the sense strand (counting from the 5′-end), and one phosphorothioate internucleotide linkage modification at positions 1 and 2 and one phosphorothioate internucleotide linkage modification within positions 18-23 of the antisense strand (counting from the 5′-end).

[0076] In one embodiment, the dsRNA of the invention further comprises one phosphorothioate internucleotide linkage modification within position 1-5 and one phosphorothioate internucleotide linkage modification within position 18-23 of the sense strand (counting from the 5′-end), and two phosphorothioate internucleotide linkage modifications at positions 1 and 2 and two phosphorothioate internucleotide linkage modifications within positions 18-23 of the antisense strand (counting from the 5′-end).

[0077] In one embodiment, the dsRNA of the invention further comprises one phosphorothioate internucleotide linkage modification within position 1-5 and one within position 18-23 of the sense strand (counting from the 5′-end), and two phosphorothioate internucleotide linkage modification at positions 1 and 2 and one phosphorothioate internucleotide linkage modification within positions 18-23 of the antisense strand (counting from the 5′-end).

[0078] In one embodiment, the dsRNA of the invention further comprises one phosphorothioate internucleotide linkage modification within position 1-5 (counting from the 5′-end), and two phosphorothioateinternucleotide linkage modifications at positions 1 and 2 and one phosphorothioate internucleotide linkage modification within positions 18-23 of the antisense strand (counting from the 5′-end).

[0079] In one embodiment, the dsRNA of the invention further comprises two phosphorothioate internucleotide linkage modifications within position 1-5 (counting from the 5′-end), and one phosphorothioateinternucleotide linkage modification at positions 1 and 2 and two phosphorothioate internucleotide linkage modifications within positions 18-23 of the antisense strand (counting from the 5′-end).

[0080] In one embodiment, the dsRNA of the invention further comprises two phosphorothioate internucleotide linkage modifications within position 1-5 and one within position 18-23 of the sense strand (counting from the 5′-end), and two phosphorothioate internucleotide linkage modifications at positions 1 and 2 and one phosphorothioate internucleotide linkage modification within positions 18-23 of the antisense strand (counting from the 5′-end).

[0081] In one embodiment, the dsRNA of the invention further comprises two phosphorothioate internucleotide linkage modifications within position 1-5 and one phosphorothioate internucleotide linkage modification within position 18-23 of the sense strand (counting from the 5′-end), and two phosphorothioate internucleotide linkage modifications at positions 1 and 2 and two phosphorothioate internucleotide linkage modifications within positions 18-23 of the antisense strand (counting from the 5′-end).

[0082] In one embodiment, the dsRNA of the invention further comprises two phosphorothioate internucleotide linkage modifications within position 1-5 and one phosphorothioate internucleotide linkage modification within position 18-23 of the sense strand (counting from the 5′-end), and one phosphorothioate internucleotide linkage modification at positions 1 and 2 and two phosphorothioate internucleotide linkage modifications within positions 18-23 of the antisense strand (counting from the 5′-end).

[0083] In one embodiment, the dsRNA of the invention further comprises two phosphorothioate internucleotide linkage modifications at position 1 and 2, and two phosphorothioate internucleotide linkage modifications at position 20 and 21 of the sense strand (counting from the 5′-end), and one phosphorothioate internucleotide linkage modification at positions 1 and one at position 21 of the antisense strand (counting from the 5′-end).

[0084] In one embodiment, the dsRNA of the invention further comprises one phosphorothioate internucleotide linkage modification at position 1, and one phosphorothioate internucleotide linkage modification at position 21 of the sense strand (counting from the 5′-end), and two phosphorothioate internucleotide linkage modifications at positions 1 and 2 and two phosphorothioate internucleotide linkage modifications at positions 20 and 21 the antisense strand (counting from the 5′-end).

[0085] In one embodiment, the dsRNA of the invention further comprises two phosphorothioate internucleotide linkage modifications at position 1 and 2, and two phosphorothioate internucleotide linkage modifications at position 21 and 22 of the sense strand (counting from the 5′-end), and one phosphorothioate internucleotide linkage modification at positions 1 and one phosphorothioate internucleotide linkage modification at position 21 of the antisense strand (counting from the 5′-end).

[0086] In one embodiment, the dsRNA of the invention further comprises one phosphorothioate internucleotide linkage modification at position 1, and one phosphorothioate internucleotide linkage modification at position 21 of the sense strand (counting from the 5′-end), and two phosphorothioate internucleotide linkage modifications at positions 1 and 2 and two phosphorothioate internucleotide linkage modifications at positions 21 and 22 the antisense strand (counting from the 5′-end).

[0087] In one embodiment, the dsRNA of the invention further comprises two phosphorothioate internucleotide linkage modifications at position 1 and 2, and two phosphorothioate internucleotide linkage modifications at position 22 and 23 of the sense strand (counting from the 5′-end), and one phosphorothioate internucleotide linkage modification at positions 1 and one phosphorothioate internucleotide linkage modification at position 21 of the antisense strand (counting from the 5′-end).

[0088] In one embodiment, the dsRNA of the invention further comprises one phosphorothioate internucleotide linkage modification at position 1, and one phosphorothioate internucleotide linkage modification at position 21 of the sense strand (counting from the 5′-end), and two phosphorothioate internucleotide linkage modifications at positions 1 and 2 and two phosphorothioate internucleotide linkage modifications at positions 23 and 23 the antisense strand (counting from the 5′-end).

[0089] In one embodiment, the dsRNA agent of the invention comprises mismatch(es) with the target, within the duplex, or combinations thereof. The mismatch can occur in the overhang region or the duplex region. The base pair can be ranked on the basis of their propensity to promote dissociation or melting (e.g., on the free energy of association or dissociation of a particular pairing, the simplest approach is to examine the pairs on an individual pair basis, though next neighbor or similar analysis can also be used). In terms of promoting dissociation: A:U is preferred over G:C; G:U is preferred over G:C; and I:C is preferred over G:C (I=inosine). Mismatches, e.g., non-canonical or other than canonical pairings (as described elsewhere herein) are preferred over canonical (A:T, A:U, G:C) pairings; and pairings which include a universal base are preferred over canonical pairings.

[0090] In one embodiment, the dsRNA agent of the invention comprises at least one of the first 1, 2, 3, 4, or 5 base pairs within the duplex regions from the 5′-end of the antisense strand can be chosen independently from the group of: A:U, G:U, I:C, and mismatched pairs, e.g., non-canonical or other than canonical pairings or pairings which include a universal base, to promote the dissociation of the antisense strand at the 5′-end of the duplex.

[0091] In one embodiment, the nucleotide at the 1 position within the duplex region from the 5′-end in the antisense strand is selected from the group consisting of A, dA, dU, U, and dT. Alternatively, at least one of the first 1, 2 or 3 base pair within the duplex region from the 5′-end of the antisense strand is an AU base pair. For example, the first base pair within the duplex region from the 5′-end of the antisense strand is an AU base pair.

[0092] In one embodiment, the sense strand sequence may be represented by formula (I):

5′ nₚ-Nₐ-(XXX)ᵢ-N_{b}-YYY-N_{b}-(ZZZ)ⱼ-Nₐ-n_{q} 3′ (I)

wherein:
[0093] i and j are each independently 0 or 1;
[0094] p and q are each independently 0-6;
[0095] each Nₐ independently represents an oligonucleotide sequence comprising 0-25 modified nucleotides, each sequence comprising at least two differently modified nucleotides;
[0096] each N_{b} independently represents an oligonucleotide sequence comprising 0-10 modified nucleotides;
[0097] each nₚ and n_{q} independently represent an overhang nucleotide;
[0098] wherein N_{b} and Y do not have the same modification; and
[0099] XXX, YYY and ZZZ each independently represent one motif of three identical modifications on three consecutive nucleotides. Preferably YYY is all 2′-F modified nucleotides.

[0100] In one embodiment, the Nₐ and/or N_{b} comprise modifications of alternating pattern.

[0101] In one embodiment, the YYY motif occurs at or near the cleavage site of the sense strand. For example, when the dsRNA agent has a duplex region of 17-23 nucleotide pairs in length, the YYY motif can occur at or the vicinity of the cleavage site (e.g.: can occur at positions 6, 7, 8, 7, 8, 9, 8, 9, 10, 9, 10, 11, 10, 11,12 or 11, 12, 13) of—the sense strand, the count starting from the 1^{st} nucleotide, from the 5′-end; or optionally, the count starting at the 1^{st} paired nucleotide within the duplex region, from the 5′-end.

[0102] In one embodiment, i is 1 and j is 0, or i is 0 and j is 1, or both i and j are 1. The sense strand can therefore be represented by the following formulas:

5′ nₚ-Nₐ-YYY-N_{b}-ZZZ-Nₐ-n_{q} 3′ (Ia);

5′ nₚ-Nₐ-XXX-N_{b}-YYY-Nₐ-n_{q} 3′ (Ib); or

5′ nₚ-Nₐ-XXX-N_{b}-YYY-N_{b}-ZZZ-Nₐ-n_{q} 3′ (Ic).

[0103] When the sense strand is represented by formula (Ia), N_{b} represents an oligonucleotide sequence comprising 0-10, 0-7, 0-5, 0-4, 0-2 or 0 modified nucleotides. Each Nₐ independently can represent an oligonucleotide sequence comprising 2-20, 2-15, or 2-10 modified nucleotides.

[0104] When the sense strand is represented as formula (Ib), N_{b} represents an oligonucleotide sequence comprising 0-10, 0-7, 0-10, 0-7, 0-5, 0-4, 0-2 or 0 modified nucleotides. Each Nₐ can independently represent an oligonucleotide sequence comprising 2-20, 2-15, or 2-10 modified nucleotides.

[0105] When the sense strand is represented as formula (Ic), each N_{b} independently represents an oligonucleotide sequence comprising 0-10, 0-7, 0-5, 0-4, 0-2 or 0 modified nucleotides. Preferably, N_{b} is 0, 1, 2, 3, 4, 5 or 6 Each Nₐ can independently represent an oligonucleotide sequence comprising 2-20, 2-15, or 2-10 modified nucleotides.

[0106] Each of X, Y and Z may be the same or different from each other.

[0107] In one embodiment, the antisense strand sequence of the dsRNA may be represented by formula (II):

5′ n_{q}′-Nₐ′-(Z′Z′Z′)ₖ-N_{b}′-Y′Y′Y′-N_{b}′-(X′X′X′)ₗ-N′ₐ-nₚ′ 3′ (II)

wherein:
[0108] k and l are each independently 0 or 1;
[0109] p and q are each independently 0-6;
[0110] each Nₐ′ independently represents an oligonucleotide sequence comprising 0-25 modified nucleotides, each sequence comprising at least two differently modified nucleotides;
[0111] each N_{b}′ independently represents an oligonucleotide sequence comprising 0-10 modified nucleotides;
[0112] each nₚ′ and n_{q}′ independently represent an overhang nucleotide comprising 0-6 nucleotides;
[0113] wherein N_{b}′ and Y′ do not have the same modification;
[0114] and
[0115] X′X′X′, Y′Y′Y′ and Z′Z′Z′ each independently represent one motif of three identical modifications on three consecutive nucleotides.

[0116] In one embodiment, the Nₐ′ and/or N_{b}′ comprise modifications of alternating pattern.

[0117] The Y′Y′Y′ motif occurs at or near the cleavage site of the antisense strand. For example, when the dsRNA agent has a duplex region of 17-23 nt in length, the Y′Y′Y′ motif can occur at positions 9, 10, 11;10, 11, 12; 11, 12, 13; 12, 13, 14; or 13, 14, 15 of the antisense strand, with the count starting from the 1^{st} nucleotide, from the 5′-end; or optionally, the count starting at the 1^{st} paired nucleotide within the duplex region, from the 5′-end. Preferably, the Y′Y′Y′ motif occurs at positions 11, 12, 13.

[0118] In one embodiment, Y′Y′Y′ motif is all 2′-OMe modified nucleotides.

[0119] In one embodiment, k is 1 and l is 0, or k is 0 and l is 1, or both k and l are 1.

[0120] The antisense strand can therefore be represented by the following formulas:

5′ n_{q}′-Nₐ′-Z′Z′Z′-N_{b}′-Y′Y′Y′-Nₐ′-nₚ′ 3′ (IIa);

5′ n_{q}′-Nₐ′-Y′Y′Y′-N_{b}′-X′X′X′-nₚ′ 3′ (IIb); or

5′ n_{q}′-Nₐ′-Z′Z′Z′-N_{b}′-Y′Y′Y′-N_{b}′-X′X′X′-Nₐ′-nₚ′ 3′ (IIc).

[0121] When the antisense strand is represented by formula (IIa), N_{b}′ represents an oligonucleotide sequence comprising 0-10, 0-7, 0-10, 0-7, 0-5, 0-4, 0-2 or 0 modified nucleotides. Each Nₐ′ independently represents an oligonucleotide sequence comprising 2-20, 2-15, or 2-10 modified nucleotides.

[0122] When the antisense strand is represented as formula (IIb), N_{b}′ represents an oligonucleotide sequence comprising 0-10, 0-7, 0-10, 0-7, 0-5, 0-4, 0-2 or 0 modified nucleotides. Each Nₐ′ independently represents an oligonucleotide sequence comprising 2-20, 2-15, or 2-10 modified nucleotides.

[0123] When the antisense strand is represented as formula (IIc), each N_{b}′ independently represents an oligonucleotide sequence comprising 0-10, 0-7, 0-10, 0-7, 0-5, 0-4, 0-2 or 0 modified nucleotides. Each Nₐ′ independently represents an oligonucleotide sequence comprising 2-20, 2-15, or 2-10 modified nucleotides. Preferably, N_{b} is 0, 1, 2, 3, 4, 5 or 6.

[0124] Each of X′, Y′ and Z′ may be the same or different from each other.

[0125] Each nucleotide of the sense strand and antisense strand may be independently modified with LNA, HNA, CeNA, 2′-methoxyethyl, 2′-O-methyl, 2′-O-allyl, 2′-C-allyl, or 2′-fluoro. For example, each nucleotide of the sense strand and antisense strand is independently modified with 2′-O-methyl or 2′-fluoro. Each X, Y, Z, X′, Y′ and Z′, in particular, may represent a 2′-O-methyl modification or a 2′-fluoro modification.

[0126] In one embodiment, the sense strand of the dsRNA agent comprises YYY motif occurring at 9, 10 and 11 positions of the strand when the duplex region is 21 nt, the count starting from the 1^{st} nucleotide from the 5′-end, or optionally, the count starting at the 1^{st} paired nucleotide within the duplex region, from the 5′-end; and Y represents 2′-F modification. The sense strand may additionally contain XXX motif or ZZZ motifs as wing modifications at the opposite end of the duplex region; and XXX and ZZZ each independently represents a 2′-OMe modification or 2′-F modification.

[0127] In one embodiment the antisense strand may contain Y′Y′Y′ motif occurring at positions 11, 12, 13 of the strand, the count starting from the 1^{st} nucleotide from the 5′-end, or optionally, the count starting at the 1^{st} paired nucleotide within the duplex region, from the 5′-end; and Y′ represents 2′-O-methyl modification. The antisense strand may additionally contain X′X′X′ motif or Z′Z′Z′ motifs as wing modifications at the opposite end of the duplex region; and X′X′X′ and Z′Z′Z′ each independently represents a 2′-OMe modification or 2′-F modification.

[0128] The sense strand represented by any one of the above formulas (Ia), (Ib) and (Ic) forms a duplex with a antisense strand being represented by any one of formulas (IIa), (IIb) and (IIc), respectively.

[0129] Accordingly, the dsRNA agent may comprise a sense strand and an antisense strand, each strand having 14 to 30 nucleotides, the dsRNA duplex represented by formula (III):

sense: 5′ nₚ-Nₐ-(XXX)ᵢ-N_{b}-YYY-N_{b}-(ZZZ)ⱼ-Nₐ-n_{q} 3′

antisense: 3′ nₚ′-Nₐ′-(X′X′X′)ₖ-N_{b}′-Y′Y′Y′-N_{b}′-(Z′Z′Z′)ₗ-Nₐ′-n_{q}′ 5′ (III)
[0130] wherein:
[0131] i, j, k, and l are each independently 0 or 1;
[0132] p and q are each independently 0-6;
[0133] each Nₐ and Nₐ′ independently represents an oligonucleotide sequence comprising 0-25 modified nucleotides, each sequence comprising at least two differently modified nucleotides;
[0134] each N_{b} and N_{b}′ independently represents an oligonucleotide sequence comprising 0-10 modified nucleotides;
[0135] wherein
[0136] each nₚ′, nₚ, n_{q}′, and n_{q} independently represents an overhang nucleotide sequence; and
[0137] XXX, YYY, ZZZ, X′X′X′, Y′Y′Y′, and Z′Z′Z′ each independently represent one motif of three identical modifications on three consecutive nucleotides.

[0138] In one embodiment, i is 1 and j is 0; or i is 0 and j is 1; or both i and j are 1. In another embodiment, k is 1 and l is 0; k is 0 and l is 1; or both k and l are 1.

[0139] In one embodiment, the dsRNA agent of the invention comprises a sense strand and an antisense strand, each strand having 14 to 30 nucleotides, the dsRNA duplex represented by formula (V):

sense: 5′ Nₐ-(XXX)ᵢ-N_{b}-YYY-N_{b}-(ZZZ)ⱼ-Nₐ-n_{q} 3′

antisense: 3′ nₚ′-Nₐ′-(X′X′X′)ₖ-N_{b}′-Y′Y′Y′-N_{b}′-(Z′Z′Z′)ₗ-Nₐ′ 5′ (V)
[0140] wherein:
[0141] i, j, k, and l are each independently 0 or 1;
[0142] p and q are each independently 2;
[0143] each Nₐ and Nₐ′ independently represents an oligonucleotide sequence comprising 0-25 modified nucleotides, each sequence comprising at least two differently modified nucleotides;
[0144] each N_{b} and N_{b}′ independently represents an oligonucleotide sequence comprising 0-10 modified nucleotides;
[0145] wherein
[0146] each nₚ′, and n_{q} independently represents an overhang nucleotide sequence; and
[0147] XXX, YYY, ZZZ, X′X′X′, Y′Y′Y′, and Z′Z′Z′ each independently represent one motif of three identical modifications on three consecutive nucleotides.

[0148] In one embodiment, i is 1 and j is 0; or i is 0 and j is 1; or both i and j are 1. In another embodiment, k is 1 and l is 0; k is 0 and l is 1; or both k and l are 1.

[0149] In one embodiment, the dsRNA agent of the invention comprises a sense strand and an antisense strand, each strand having 14 to 30 nucleotides, the dsRNA duplex represented by formula (Va):

sense: 5′ Nₐ-(XXX)ᵢ-N_{b}-YYY-N_{b}-(ZZZ)ⱼ-Nₐ 3′

antisense: 3′ nₚ′-Nₐ′-(X′X′X′)ₖ-N_{b}′-Y′Y′Y′-N_{b}′-(Z′Z′Z′)ₗ-Nₐ′ 5′ (Va)
[0150] wherein:
[0151] i, j, k, and l are each independently 0 or 1;
[0152] p and q are each independently 2;
[0153] each Nₐ and Nₐ′ independently represents an oligonucleotide sequence comprising 0-25 modified nucleotides, each sequence comprising at least two differently modified nucleotides;
[0154] each N_{b} and N_{b}′ independently represents an oligonucleotide sequence comprising 0-10 modified nucleotides;
[0155] wherein
[0156] nₚ′ represents an overhang nucleotide sequence; and
[0157] XXX, YYY, ZZZ, X′X′X′, Y′Y′Y′, and Z′Z′Z′ each independently represent one motif of three identical modifications on three consecutive nucleotides.

[0158] Exemplary combinations of the sense strand and antisense strand forming a dsRNA duplex include the formulas below:

5′ nₚ-Nₐ-YYY-N_{b}-ZZZ-Nₐ-n_{q} 3′

3′ nₚ′-Nₐ′-Y′Y′Y′-N_{b}′-Z′Z′Z′-Nₐ′n_{q}′ 5′ (IIIa)

5′ nₚ-Nₐ-XXX-N_{b}-YYY-Nₐ-n_{q} 3′

3′ nₚ′-Nₐ′-X′X′X′-N_{b}′-Y′Y′Y′-Nₐ′-n_{q}′ 5′ (IIIb)

5′ nₚ-Nₐ-XXX-N_{b}-YYY-N_{b}-ZZZ-Nₐ-n_{q} 3′

3′ nₚ′-Nₐ′-X′X′X′-N_{b}′-Y′Y′Y′-N_{b}′-Z′Z′Z′-Nₐ-n_{q}′ 5′ (IIIc)

[0159] When the dsRNA agent is represented by formula (IIIa), each N_{b} and N_{b}′ independently represents an oligonucleotide sequence comprising 1-10, 1-7, 1-5 or 1-4 modified nucleotides. Each Nₐ and Nₐ′ independently represents an oligonucleotide sequence comprising 2-20, 2-15, or 2-10 modified nucleotides.

[0160] When the dsRNA agent is represented as formula (IIIb), each N_{b} and N_{b}′ independently represents an oligonucleotide sequence comprising 0-10, 0-7, 0-10, 0-7, 0-5, 0-4, 0-2 or 0 modified nucleotides. Each Nₐ and Nₐ′ independently represents an oligonucleotide sequence comprising 2-20, 2-15, or 2-10 modified nucleotides.

[0161] When the dsRNA agent is represented as formula (IIIc), each N_{b} and N_{b}′ independently represents an oligonucleotide sequence comprising 0-10, 0-7, 0-10, 0-7, 0-5, 0-4, 0-2 or 0 modified nucleotides. Each Nₐ and Nₐ′ independently represents an oligonucleotide sequence comprising 2-20, 2-15, or 2-10 modified nucleotides. Each of Nₐ, Nₐ′, N_{b} and N_{b}′ independently comprises modifications of alternating pattern.

[0162] Each of X, Y and Z in formulas (III), (IIIa), (IIIb) and (IIIc) may be the same or different from each other.

[0163] When the dsRNA agent is represented by formula (III), (IIIa), (IIIb) or (IIIc), at least one of the Y nucleotides may form a base pair with one of the Y′ nucleotides. Alternatively, at least two of the Y nucleotides form base pairs with the corresponding Y′ nucleotides; or all three of the Y nucleotides all form base pairs with the corresponding Y′ nucleotides.

[0164] It is understood that Nₐ nucleotides from base pair with Nₐ′, N_{b} nucleotides from base pair with N_{b}′, X nucleotides from base pair with X′, Y nucleotides from base pair with Y′, and Z nucleotides from base pair with Z′.

[0165] When the dsRNA agent is represented by formula (IIIa) or (IIIc), at least one of the Z nucleotides may form a base pair with one of the Z′ nucleotides. Alternatively, at least two of the Z nucleotides form base pairs with the corresponding Z′ nucleotides; or all three of the Z nucleotides all form base pairs with the corresponding Z′ nucleotides.

[0166] When the dsRNA agent is represented as formula (IIIb) or (IIIc), at least one of the X nucleotides may form a base pair with one of the X′ nucleotides. Alternatively, at least two of the X nucleotides form base pairs with the corresponding X′ nucleotides; or all three of the X nucleotides all form base pairs with the corresponding X′ nucleotides.

[0167] In one embodiment, the modification on the Y nucleotide is different than the modification on the Y′ nucleotide, the modification on the Z nucleotide is different than the modification on the Z′ nucleotide, and/or the modification on the X nucleotide is different than the modification on the X′ nucleotide.

[0168] In one embodiment, the dsRNA agent is a multimer containing at least two duplexes represented by formula (III), (IIIa), (IIIb) or (IIIc), wherein said duplexes are connected by a linker. The linker can be cleavable or non-cleavable. Optionally, said multimer further comprise a ligand. Each of the dsRNA can target the same gene or two different genes; or each of the dsRNA can target same gene at two different target sites.

[0169] In one embodiment, the dsRNA agent is a multimer containing three, four, five, six or more duplexes represented by formula (III), (IIIa), (IIIb) or (IIIc), wherein said duplexes are connected by a linker. The linker can be cleavable or non-cleavable. Optionally, said multimer further comprises a ligand. Each of the dsRNA can target the same gene or two different genes; or each of the dsRNA can target same gene at two different target sites.

[0170] In one embodiment, two dsRNA agent represented by formula (III), (IIIa), (IIIb) or (IIIc) are linked to each other at the 5′ end, and one or both of the 3′ ends of the are optionally conjugated to a ligand. Each of the dsRNA can target the same gene or two different genes; or each of the dsRNA can target same gene at two different target sites.

[0171] Various publications described multimeric siRNA and can all be used with the dsRNA of the invention. Such publications include WO2007/091269, U.S. Pat. No. 7,858,769, WO2010/141511, WO2007/117686, WO2009/014887 and WO2011/031520 which are hereby incorporated by their entirely.

[0172] The dsRNA agent that contains conjugations of one or more carbohydrate moieties to a dsRNA agent can optimize one or more properties of the dsRNA agent. In many cases, the carbohydrate moiety will be attached to a modified subunit of the dsRNA agent. E.g., the ribose sugar of one or more ribonucleotide subunits of a dsRNA agent can be replaced with another moiety, e.g., a non-carbohydrate (preferably cyclic) carrier to which is attached a carbohydrate ligand. A ribonucleotide subunit in which the ribose sugar of the subunit has been so replaced is referred to herein as a ribose replacement modification subunit (RRMS). A cyclic carrier may be a carbocyclic ring system, i.e., all ring atoms are carbon atoms, or a heterocyclic ring system, i.e., one or more ring atoms may be a heteroatom, e.g., nitrogen, oxygen, sulfur. The cyclic carrier may be a monocyclic ring system, or may contain two or more rings, e.g. fused rings. The cyclic carrier may be a fully saturated ring system, or it may contain one or more double bonds.

[0173] The ligand may be attached to the polynucleotide via a carrier. The carriers include (i) at least one “backbone attachment point,” preferably two “backbone attachment points” and (ii) at least one “tethering attachment point.” A “backbone attachment point” as used herein refers to a functional group, e.g. a hydroxyl group, or generally, a bond available for, and that is suitable for incorporation of the carrier into the backbone, e.g., the phosphate, or modified phosphate, e.g., sulfur containing, backbone, of a ribonucleic acid. A “tethering attachment point” (TAP) in some embodiments refers to a constituent ring atom of the cyclic carrier, e.g., a carbon atom or a heteroatom (distinct from an atom which provides a backbone attachment point), that connects a selected moiety. The moiety can be, e.g., a carbohydrate, e.g. monosaccharide, disaccharide, trisaccharide, tetrasaccharide, oligosaccharide and polysaccharide. Optionally, the selected moiety is connected by an intervening tether to the cyclic carrier. Thus, the cyclic carrier will often include a functional group, e.g., an amino group, or generally, provide a bond, that is suitable for incorporation or tethering of another chemical entity, e.g., a ligand to the constituent ring.

[0174] In embodiment the dsRNA of the invention is conjugated to a ligand via a carrier, wherein the carrier can be cyclic group or acyclic group; preferably, the cyclic group is selected from pyrrolidinyl, pyrazolinyl, pyrazolidinyl, imidazolinyl, imidazolidinyl, piperidinyl, piperazinyl, [1,3]dioxolane, oxazolidinyl, isoxazolidinyl, morpholinyl, thiazolidinyl, isothiazolidinyl, quinoxalinyl, pyridazinonyl, tetrahydrofuryl and decalin; preferably, the acyclic group is selected from serinol backbone or diethanolamine backbone.

[0175] The double-stranded RNA (dsRNA) agent of the invention may optionally be conjugated to one or more ligands. The ligand can be attached to the sense strand, antisense strand or both strands, at the 3′-end, 5′-end or both ends. For instance, the ligand may be conjugated to the sense strand, in particular, the 3′-end of the sense strand.

### Ligands

[0176] A wide variety of entities can be coupled to the oligonucleotides of the present invention. Preferred moieties are ligands, which are coupled, preferably covalently, either directly or indirectly via an intervening tether.

[0177] In preferred embodiments, a ligand alters the distribution, targeting or lifetime of the molecule into which it is incorporated. In preferred embodiments a ligand provides an enhanced affinity for a selected target, e.g., molecule, cell or cell type, compartment, receptor e.g., a cellular or organ compartment, tissue, organ or region of the body, as, e.g., compared to a species absent such a ligand. Ligands providing enhanced affinity for a selected target are also termed targeting ligands.

[0178] Some ligands can have endosomolytic properties. The endosomolytic ligands promote the lysis of the endosome and/or transport of the composition of the invention, or its components, from the endosome to the cytoplasm of the cell. The endosomolytic ligand may be a polyanionic peptide or peptidomimetic which shows pH-dependent membrane activity and fusogenicity. In one embodiment, the endosomolytic ligand assumes its active conformation at endosomal pH. The “active” conformation is that conformation in which the endosomolytic ligand promotes lysis of the endosome and/or transport of the composition of the invention, or its components, from the endosome to the cytoplasm of the cell. Exemplary endosomolytic ligands include the GALA peptide (Subbarao et al., Biochemistry, 1987, 26: 2964-2972), the EALA peptide (Vogel et al., J. Am. Chem. Soc., 1996, 118: 1581-1586), and their derivatives (Turk et al., Biochem. Biophys. Acta, 2002, 1559: 56-68). In one embodiment, the endosomolytic component may contain a chemical group (e.g., an amino acid) which will undergo a change in charge or protonation in response to a change in pH. The endosomolytic component may be linear or branched.

[0179] Ligands can improve transport, hybridization, and specificity properties and may also improve nuclease resistance of the resultant natural or modified oligoribonucleotide, or a polymeric molecule comprising any combination of monomers described herein and/or natural or modified ribonucleotides.

[0180] Ligands in general can include therapeutic modifiers, e.g., for enhancing uptake; diagnostic compounds or reporter groups e.g., for monitoring distribution; cross-linking agents; and nuclease-resistance conferring moieties. General examples include lipids, steroids, vitamins, sugars, proteins, peptides, polyamines, and peptide mimics.

[0181] Ligands can include a naturally occurring substance, such as a protein (e.g., human serum albumin (HSA), low-density lipoprotein (LDL), high-density lipoprotein (HDL), or globulin); a carbohydrate (e.g., a dextran, pullulan, chitin, chitosan, inulin, cyclodextrin or hyaluronic acid); or a lipid. The ligand may also be a recombinant or synthetic molecule, such as a synthetic polymer, e.g., a synthetic polyamino acid, an oligonucleotide (e.g. an aptamer). Examples of polyamino acids include polyamino acid is a polylysine (PLL), poly L-aspartic acid, poly L-glutamic acid, styrene-maleic acid anhydride copolymer, poly(L-lactide-co-glycolied) copolymer, divinyl ether-maleic anhydride copolymer, N-(2-hydroxypropyl)methacrylamide copolymer (HMPA), polyethylene glycol (PEG), polyvinyl alcohol (PVA), polyurethane, poly(2-ethylacryllic acid), N-isopropylacrylamide polymers, or polyphosphazine. Example of polyamines include: polyethylenimine, polylysine (PLL), spermine, spermidine, polyamine, pseudopeptide-polyamine, peptidomimetic polyamine, dendrimer polyamine, arginine, amidine, protamine, cationic lipid, cationic porphyrin, quaternary salt of a polyamine, or an alpha helical peptide.

[0182] Ligands can also include targeting groups, e.g., a cell or tissue targeting agent, e.g., a lectin, glycoprotein, lipid or protein, e.g., an antibody, that binds to a specified cell type such as a kidney cell. A targeting group can be a thyrotropin, melanotropin, lectin, glycoprotein, surfactant protein A, Mucin carbohydrate, multivalent lactose, multivalent galactose, N-acetyl-galactosamine, N-acetyl-gulucosamine multivalent mannose, multivalent fucose, glycosylated polyaminoacids, multivalent galactose, transferrin, bisphosphonate, polyglutamate, polyaspartate, a lipid, cholesterol, a steroid, bile acid, folate, vitamin B12, biotin, an RGD peptide, an RGD peptide mimetic or an aptamer. Table 2 shows some examples of targeting ligands and their associated receptors.

[0183] Other examples of ligands include dyes, intercalating agents (e.g. acridines), cross-linkers (e.g. psoralene, mitomycin C), porphyrins (TPPC4, texaphyrin, Sapphyrin), polycyclic aromatic hydrocarbons (e.g., phenazine, dihydrophenazine), artificial endonucleases or a chelator (e.g. EDTA), lipophilic molecules, e.g, cholesterol, cholic acid, adamantane acetic acid, 1-pyrene butyric acid, dihydrotestosterone, 1,3-Bis-O(hexadecyl)glycerol, geranyloxyhexyl group, hexadecylglycerol, borneol, menthol, 1,3-propanediol, heptadecyl group, palmitic acid, myristic acid, O3-(oleoyl)lithocholic acid, O3-(oleoyl)cholenic acid, dimethoxytrityl, or phenoxazine) and peptide conjugates (e.g., antennapedia peptide, Tat peptide), alkylating agents, phosphate, amino, mercapto, PEG (e.g., PEG-40K), MPEG, [MPEG]₂, polyamino, alkyl, substituted alkyl, radiolabeled markers, enzymes, haptens (e.g. biotin), transport/absorption facilitators (e.g., aspirin, vitamin E, folic acid), synthetic ribonucleases (e.g., imidazole, bisimidazole, histamine, imidazole clusters, acridine-imidazole conjugates, Eu3+ complexes of tetraazamacrocycles), dinitrophenyl, HRP, or AP.

[0184] Ligands can be proteins, e.g., glycoproteins, or peptides, e.g., molecules having a specific affinity for a co-ligand, or antibodies e.g., an antibody, that binds to a specified cell type such as a cancer cell, endothelial cell, or bone cell. Ligands may also include hormones and hormone receptors. They can also include non-peptidic species, such as lipids, lectins, carbohydrates, vitamins, cofactors, multivalent lactose, multivalent galactose, N-acetyl-galactosamine, N-acetyl-gulucosamine multivalent mannose, multivalent fucose, or aptamers. The ligand can be, for example, a lipopolysaccharide, an activator of p38 MAP kinase, or an activator of NF-κB.

[0185] The ligand can be a substance, e.g, a drug, which can increase the uptake of the iRNA agent into the cell, for example, by disrupting the cell's cytoskeleton, e.g., by disrupting the cell's microtubules, microfilaments, and/or intermediate filaments. The drug can be, for example, taxon, vincristine, vinblastine, cytochalasin, nocodazole, japlakinolide, latrunculin A, phalloidin, swinholide A, indanocine, or myoservin.

[0186] The ligand can increase the uptake of the oligonucleotide into the cell by activating an inflammatory response, for example. Exemplary ligands that would have such an effect include tumor necrosis factor alpha (TNFalpha), interleukin-1 beta, or gamma interferon.

[0187] In one aspect, the ligand is a lipid or lipid-based molecule. Such a lipid or lipid-based molecule preferably binds a serum protein, e.g., human serum albumin (HSA). An HSA binding ligand allows for distribution of the conjugate to a target tissue, e.g., a non-kidney target tissue of the body. For example, the target tissue can be the liver, including parenchymal cells of the liver. Other molecules that can bind HSA can also be used as ligands. For example, naproxen or aspirin can be used. A lipid or lipid-based ligand can (a) increase resistance to degradation of the conjugate, (b) increase targeting or transport into a target cell or cell membrane, and/or (c) can be used to adjust binding to a serum protein, e.g., HSA.

[0188] A lipid based ligand can be used to modulate, e.g., control the binding of the conjugate to a target tissue. For example, a lipid or lipid-based ligand that binds to HSA more strongly will be less likely to be targeted to the kidney and therefore less likely to be cleared from the body. A lipid or lipid-based ligand that binds to HSA less strongly can be used to target the conjugate to the kidney.

[0189] In a preferred embodiment, the lipid based ligand binds HSA. Preferably, it binds HSA with a sufficient affinity such that the conjugate will be preferably distributed to a non-kidney tissue. However, it is preferred that the affinity not be so strong that the HSA-ligand binding cannot be reversed.

[0190] In another preferred embodiment, the lipid based ligand binds HSA weakly or not at all, such that the conjugate will be preferably distributed to the kidney. Other moieties that target to kidney cells can also be used in place of or in addition to the lipid based ligand.

[0191] In another aspect, the ligand is a moiety, e.g., a vitamin, which is taken up by a target cell, e.g., a proliferating cell. These are particularly useful for treating disorders characterized by unwanted cell proliferation, e.g., of the malignant or non-malignant type, e.g., cancer cells.

[0192] Exemplary vitamins include vitamin A, E, and K. Other exemplary vitamins include B vitamins, e.g., folic acid, B12, riboflavin, biotin, pyridoxal or other vitamins or nutrients taken up by cancer cells. Also included are HAS, low density lipoprotein (LDL) and high-density lipoprotein (HDL).

[0193] In another aspect, the ligand is a cell-permeation agent, preferably a helical cell-permeation agent. Preferably, the agent is amphipathic. An exemplary agent is a peptide such as tat or antennopedia. If the agent is a peptide, it can be modified, including a peptidylmimetic, invertomers, non-peptide or pseudo-peptide linkages, and use of D-amino acids. The helical agent is preferably an alpha-helical agent, which preferably has a lipophilic and a lipophobic phase.

[0194] The ligand can be a peptide or peptidomimetic. A peptidomimetic (also referred to herein as an oligopeptidomimetic) is a molecule capable of folding into a defined three-dimensional structure similar to a natural peptide. The peptide or peptidomimetic moiety can be about 5-50 amino acids long, e.g., about 5, 10, 15, 20, 25, 30, 35, 40, 45, or 50 amino acids long. A peptide or peptidomimetic can be, for example, a cell permeation peptide, cationic peptide, amphipathic peptide, or hydrophobic peptide (e.g., consisting primarily of Tyr, Trp or Phe). The peptide moiety can be a dendrimer peptide, constrained peptide or crosslinked peptide. In another alternative, the peptide moiety can include a hydrophobic membrane translocation sequence (MTS). An exemplary hydrophobic MTS-containing peptide is RFGF having the amino acid sequence AAVALLPAVLLALLAP (SEQ ID NO: 1). An RFGF analogue (e.g., amino acid sequence AALLPVLLAAP (SEQ ID NO: 2)) containing a hydrophobic MTS can also be a targeting moiety. The peptide moiety can be a “delivery” peptide, which can carry large polar molecules including peptides, oligonucleotides, and protein across cell membranes. For example, sequences from the HIV Tat protein (GRKKRRQRRRPPQ) (SEQ ID NO: 3) and the Drosophila Antennapedia protein (RQIKIWFQNRRMKWKK) (SEQ ID NO: 4) have been found to be capable of functioning as delivery peptides. A peptide or peptidomimetic can be encoded by a random sequence of DNA, such as a peptide identified from a phage-display library, or one-bead-one-compound (OBOC) combinatorial library (Lam et al., Nature, 354:82-84, 1991). Preferably the peptide or peptidomimetic tethered to an iRNA agent via an incorporated monomer unit is a cell targeting peptide such as an arginine-glycine-aspartic acid (RGD)-peptide, or RGD mimic. A peptide moiety can range in length from about 5 amino acids to about 40 amino acids. The peptide moieties can have a structural modification, such as to increase stability or direct conformational properties. Any of the structural modifications described below can be utilized. An RGD peptide moiety can be used to target a tumor cell, such as an endothelial tumor cell or a breast cancer tumor cell (Zitzmann et al., Cancer Res., 62:5139-43, 2002). An RGD peptide can facilitate targeting of an iRNA agent to tumors of a variety of other tissues, including the lung, kidney, spleen, or liver (Aoki et al., Cancer Gene Therapy 8:783-787, 2001). Preferably, the RGD peptide will facilitate targeting of an iRNA agent to the kidney. The RGD peptide can be linear or cyclic, and can be modified, e.g., glycosylated or methylated to facilitate targeting to specific tissues. For example, a glycosylated RGD peptide can deliver an iRNA agent to a tumor cell expressing αᵥβ₃ (Haubner et al., Jour. Nucl. Med., 42:326-336, 2001). Peptides that target markers enriched in proliferating cells can be used. E.g., RGD containing peptides and peptidomimetics can target cancer cells, in particular cells that exhibit an integrin. Thus, one could use RGD peptides, cyclic peptides containing RGD, RGD peptides that include D-amino acids, as well as synthetic RGD mimics. In addition to RGD, one can use other moieties that target the integrin ligand. Generally, such ligands can be used to control proliferating cells and angiogenesis. Preferred conjugates of this type ligands that targets PECAM-1, VEGF, or other cancer gene, e.g., a cancer gene described herein.

[0195] A “cell permeation peptide” is capable of permeating a cell, e.g., a microbial cell, such as a bacterial or fungal cell, or a mammalian cell, such as a human cell. A microbial cell-permeating peptide can be, for example, an α-helical linear peptide (e.g., LL-37 or Ceropin P1), a disulfide bond-containing peptide (e.g., α-defensin, β-defensin or bactenecin), or a peptide containing only one or two dominating amino acids (e.g., PR-39 or indolicidin). A cell permeation peptide can also include a nuclear localization signal (NLS). For example, a cell permeation peptide can be a bipartite amphipathic peptide, such as MPG, which is derived from the fusion peptide domain of HIV-1 gp41 and the NLS of SV40 large T antigen (Simeoni et al., Nucl. Acids Res. 31:2717-2724, 2003).

[0196] In one embodiment, a targeting peptide can be an amphipathic α-helical peptide. Exemplary amphipathic α-helical peptides include, but are not limited to, cecropins, lycotoxins, paradaxins, buforin, CPF, bombinin-like peptide (BLP), cathelicidins, ceratotoxins, S. clava peptides, hagfish intestinal antimicrobial peptides (HFIAPs), magainines, brevinins-2, dermaseptins, melittins, pleurocidin, H₂A peptides, Xenopus peptides, esculentinis-1, and caerins. A number of factors will preferably be considered to maintain the integrity of helix stability. For example, a maximum number of helix stabilization residues will be utilized (e.g., leu, ala, or lys), and a minimum number helix destabilization residues will be utilized (e.g., proline, or cyclic monomeric units. The capping residue will be considered (for example Gly is an exemplary N-capping residue and/or C-terminal amidation can be used to provide an extra H-bond to stabilize the helix. Formation of salt bridges between residues with opposite charges, separated by i±3, or i±4 positions can provide stability. For example, cationic residues such as lysine, arginine, homo-arginine, ornithine or histidine can form salt bridges with the anionic residues glutamate or aspartate.

[0197] Peptide and peptidomimetic ligands include those having naturally occurring or modified peptides, e.g., D or L peptides; α, β, or γ peptides; N-methyl peptides; azapeptides; peptides having one or more amide, i.e., peptide, linkages replaced with one or more urea, thiourea, carbamate, or sulfonyl urea linkages; or cyclic peptides.

[0198] The targeting ligand can be any ligand that is capable of targeting a specific receptor. Examples are: folate, GalNAc, galactose, mannose, mannose-6P, clusters of sugars such as GalNAc cluster, mannose cluster, galactose cluster, or an apatamer. A cluster is a combination of two or more sugar units. The targeting ligands also include integrin receptor ligands, Chemokine receptor ligands, transferrin, biotin, serotonin receptor ligands, PSMA, endothelin, GCPII, somatostatin, LDL and HDL ligands. The ligands can also be based on nucleic acid, e.g., an aptamer. The aptamer can be unmodified or have any combination of modifications disclosed herein.

[0199] Endosomal release agents include imidazoles, poly or oligoimidazoles, PEIs, peptides, fusogenic peptides, polycaboxylates, polyacations, masked oligo or poly cations or anions, acetals, polyacetals, ketals/polyketyals, orthoesters, polymers with masked or unmasked cationic or anionic charges, dendrimers with masked or unmasked cationic or anionic charges.

[0200] PK modulator stands for pharmacokinetic modulator. PK modulator include lipophiles, bile acids, steroids, phospholipid analogues, peptides, protein binding agents, PEG, vitamins etc. Exemplary PK modulator include, but are not limited to, cholesterol, fatty acids, cholic acid, lithocholic acid, dialkylglycerides, diacylglyceride, phospholipids, sphingolipids, naproxen, ibuprofen, vitamin E, biotin etc. Oligonucleotides that comprise a number of phosphorothioate linkages are also known to bind to serum protein, thus short oligonucleotides, e.g. oligonucleotides of about 5 bases, 10 bases, 15 bases or 20 bases, comprising multiple of phosphorothioate linkages in the backbone are also amenable to the present invention as ligands (e.g. as PK modulating ligands).

[0201] In addition, aptamers that bind serum components (e.g. serum proteins) are also amenable to the present invention as PK modulating ligands.

[0202] Other ligand conjugates amenable to the invention are described in U.S. Patent Applications U.S. Ser. No. 10/916,185, filed Aug. 10, 2004; U.S. Ser. No. 10/946,873, filed Sep. 21, 2004; U.S. Ser. No. 10/833,934, filed Aug. 3, 2007; U.S. Ser. No. 11/115,989 filed Apr. 27, 2005 and U.S. Ser. No. 11/944,227 filed Nov. 21, 2007, which are incorporated by reference in their entireties for all purposes.

[0203] When two or more ligands are present, the ligands can all have same properties, all have different properties or some ligands have the same properties while others have different properties. For example, a ligand can have targeting properties, have endosomolytic activity or have PK modulating properties. In a preferred embodiment, all the ligands have different properties.

[0204] Ligands can be coupled to the oligonucleotides at various places, for example, 3′-end, 5′-end, and/or at an internal position. In preferred embodiments, the ligand is attached to the oligonucleotides via an intervening tether, e.g. a carrier described herein. The ligand or tethered ligand may be present on a monomer when said monomer is incorporated into the growing strand. In some embodiments, the ligand may be incorporated via coupling to a “precursor” monomer after said “precursor” monomer has been incorporated into the growing strand. For example, a monomer having, e.g., an amino-terminated tether (i.e., having no associated ligand), e.g., TAP-(CH₂)ₙNH₂ may be incorporated into a growing oligonucleotide strand. In a subsequent operation, i.e., after incorporation of the precursor monomer into the strand, a ligand having an electrophilic group, e.g., a pentafluorophenyl ester or aldehyde group, can subsequently be attached to the precursor monomer by coupling the electrophilic group of the ligand with the terminal nucleophilic group of the precursor monomer's tether.

[0205] In another example, a monomer having a chemical group suitable for taking part in Click Chemistry reaction may be incorporated e.g., an azide or alkyne terminated tether/linker. In a subsequent operation, i.e., after incorporation of the precursor monomer into the strand, a ligand having complementary chemical group, e.g. an alkyne or azide can be attached to the precursor monomer by coupling the alkyne and the azide together.

[0206] For double-stranded oligonucleotides, ligands can be attached to one or both strands. In some embodiments, a double-stranded iRNA agent contains a ligand conjugated to the sense strand. In other embodiments, a double-stranded iRNA agent contains a ligand conjugated to the antisense strand.

[0207] In some embodiments, ligand can be conjugated to nucleobases, sugar moieties, or internucleosidic linkages of nucleic acid molecules. Conjugation to purine nucleobases or derivatives thereof can occur at any position including, endocyclic and exocyclic atoms. In some embodiments, the 2-, 6-, 7-, or 8-positions of a purine nucleobase are attached to a conjugate moiety. Conjugation to pyrimidine nucleobases or derivatives thereof can also occur at any position. In some embodiments, the 2-, 5-, and 6-positions of a pyrimidine nucleobase can be substituted with a conjugate moiety. Conjugation to sugar moieties of nucleosides can occur at any carbon atom. Example carbon atoms of a sugar moiety that can be attached to a conjugate moiety include the 2′, 3′, and 5′ carbon atoms. The 1′ position can also be attached to a conjugate moiety, such as in an abasic residue. Internucleosidic linkages can also bear conjugate moieties. For phosphorus-containing linkages (e.g., phosphodiester, phosphorothioate, phosphorodithiotate, phosphoroamidate, and the like), the conjugate moiety can be attached directly to the phosphorus atom or to an O, N, or S atom bound to the phosphorus atom. For amine- or amide-containing internucleosidic linkages (e.g., PNA), the conjugate moiety can be attached to the nitrogen atom of the amine or amide or to an adjacent carbon atom.

[0208] Any suitable ligand in the field of RNA interference may be used, although the ligand is typically a carbohydrate e.g. monosaccharide (such as GalNAc), disaccharide, trisaccharide, tetrasaccharide, polysaccharide.

[0209] Linkers that conjugate the ligand to the nucleic acid include those discussed above. For example, the ligand can be one or more GalNAc (N-acetylglucosamine) derivatives attached through a bivalent or trivalent branched linker.

[0210] In one embodiment, the dsRNA of the invention is conjugated to a bivalent and trivalent branched linkers include the structures shown in any of formula (IV)-(VII):

[chemical structure]

wherein:
[0211] q^{2A}, q^{2B}, q^{3A}, q^{3B}, q4^{A}, q^{4B}, q^{5A}, q^{5B} and q^{5C} represent independently for each occurrence 0-20 and wherein the repeating unit can be the same or different;
[0212] P^{2A}, P^{2B}, P^{3A}, P^{3B}, P^{4A}, P^{4B}, P^{5A}, P^{5B}, P^{5C}, T^{2A}, T^{2B}, T^{3A}, T^{3B}, T^{4A}, T^{4B}, T^{4A}, T^{5B}, T^{5C} are each independently for each occurrence absent, CO, NH, O, S, OC(O), NHC(O), CH₂, CH₂NH or CH₂O;
[0213] Q^{2A}, Q^{2B}, Q^{3A}, Q^{3B}, Q^{4A}, Q^{4B}, Q^{5A}, Q^{5B}, Q^{5C} are independently for each occurrence absent, alkylene, substituted alkylene wherein one or more methylenes can be interrupted or terminated by one or more of O, S, S(O), SO₂, N(R^{N}), C(R′)═C(R″), C≡C or C(O);
[0214] R^{2A}, R^{2B}, R^{3A}, R^{3B}, R^{4A}, R^{4B}, R^{5A}, R^{5B}, R^{5C} are each independently for each occurrence absent, NH, O, S, CH₂, C(O)O, C(O)NH, NHCH(R^{a})C(O), —C(O)—CH(R^{a})—NH—, CO, CH═N—O,

[chemical structure]

or heterocyclyl;
[0215] L^{2A}, L^{2B}, L^{3A}, L^{3B}, L^{4A}, L^{4B}, L^{5A}, L^{5B} and L^{5C} represent the ligand; i.e. each independently for each occurrence a monosaccharide (such as GalNAc), disaccharide, trisaccharide, tetrasaccharide, oligosaccharide, or polysaccharide; and
[0216] R^{a} is H or amino acid side chain.

[0217] Trivalent conjugating GalNAc derivatives are particularly useful for use with RNAi agents for inhibiting the expression of a target gene, such as those of formula (VII):

[chemical structure]

[0218] wherein L^{5A}, L^{5B} and L^{5C} represent a monosaccharide, such as GalNAc derivative.

[0219] Examples of suitable bivalent and trivalent branched linker groups conjugating GalNAc derivatives include, but are not limited to, the following compounds:

[chemical structure]

[chemical structure]

[chemical structure]

[chemical structure]

### Definitions

[0220] As used herein, the terms “dsRNA”, “siRNA”, and “iRNA agent” are used interchangeably to agents that can mediate silencing of a target RNA, e.g., mRNA, e.g., a transcript of a gene that encodes a protein. For convenience, such mRNA is also referred to herein as mRNA to be silenced. Such a gene is also referred to as a target gene. In general, the RNA to be silenced is an endogenous gene or a pathogen gene. In addition, RNAs other than mRNA, e.g., tRNAs, and viral RNAs, can also be targeted.

[0221] As used herein, the phrase “mediates RNAi” refers to the ability to silence, in a sequence specific manner, a target RNA. While not wishing to be bound by theory, it is believed that silencing uses the RNAi machinery or process and a guide RNA, e.g., an siRNA agent of 21 to 23 nucleotides.

[0222] As used herein, “specifically hybridizable” and “complementary” are terms which are used to indicate a sufficient degree of complementarity such that stable and specific binding occurs between a compound of the invention and a target RNA molecule. Specific binding requires a sufficient degree of complementarity to avoid non-specific binding of the oligomeric compound to non-target sequences under conditions in which specific binding is desired, i.e., under physiological conditions in the case of assays or therapeutic treatment, or in the case of in vitro assays, under conditions in which the assays are performed. The non-target sequences typically differ by at least 5 nucleotides.

[0223] In one embodiment, a dsRNA agent of the invention is “sufficiently complementary” to a target RNA, e.g., a target mRNA, such that the dsRNA agent silences production of protein encoded by the target mRNA. In another embodiment, the dsRNA agent of the invention is “exactly complementary” to a target RNA, e.g., the target RNA and the dsRNA duplex agent anneal, for example to form a hybrid made exclusively of Watson-Crick base pairs in the region of exact complementarity. A “sufficiently complementary” target RNA can include an internal region (e.g., of at least 10 nucleotides) that is exactly complementary to a target RNA. Moreover, in some embodiments, the dsRNA agent of the invention specifically discriminates a single-nucleotide difference. In this case, the dsRNA agent only mediates RNAi if exact complementary is found in the region (e.g., within 7 nucleotides of) the single-nucleotide difference.

[0224] As used herein, the term “oligonucleotide” refers to a nucleic acid molecule (RNA or DNA) for example of length less than 100, 200, 300, or 400 nucleotides.

[0225] The term “halo” refers to any radical of fluorine, chlorine, bromine or iodine. The term “alkyl” refers to saturated and unsaturated non-aromatic hydrocarbon chains that may be a straight chain or branched chain, containing the indicated number of carbon atoms (these include without limitation propyl, allyl, or propargyl), which may be optionally inserted with N, O, or S. For example, C₁-C₁₀ indicates that the group may have from 1 to 10 (inclusive) carbon atoms in it. The term “alkoxy” refers to an-O-alkyl radical. The term “alkylene” refers to a divalent alkyl (i.e., —R—). The term “alkylenedioxo” refers to a divalent species of the structure —O—R—O—, in which R represents an alkylene. The term “aminoalkyl” refers to an alkyl substituted with an amino The term “mercapto” refers to an —SH radical. The term “thioalkoxy” refers to an —S-alkyl radical.

[0226] The term “aryl” refers to a 6-carbon monocyclic or 10-carbon bicyclic aromatic ring system wherein 0, 1, 2, 3, or 4 atoms of each ring may be substituted by a substituent. Examples of aryl groups include phenyl, naphthyl and the like. The term “arylalkyl” or the term “aralkyl” refers to alkyl substituted with an aryl. The term “arylalkoxy” refers to an alkoxy substituted with aryl.

[0227] The term “cycloalkyl” as employed herein includes saturated and partially unsaturated cyclic hydrocarbon groups having 3 to 12 carbons, for example, 3 to 8 carbons, and, for example, 3 to 6 carbons, wherein the cycloalkyl group additionally may be optionally substituted. Cycloalkyl groups include, without limitation, cyclopropyl, cyclobutyl, cyclopentyl, cyclopentenyl, cyclohexyl, cyclohexenyl, cycloheptyl, and cyclooctyl.

[0228] The term “heteroaryl” refers to an aromatic 5-8 membered monocyclic, 8-12 membered bicyclic, or 11-14 membered tricyclic ring system having 1-3 heteroatoms if monocyclic, 1-6 heteroatoms if bicyclic, or 1-9 heteroatoms if tricyclic, said heteroatoms selected from O, N, or S (e.g., carbon atoms and 1-3, 1-6, or 1-9 heteroatoms of N, O, or S if monocyclic, bicyclic, or tricyclic, respectively), wherein 0, 1, 2, 3, or 4 atoms of each ring may be substituted by a substituent. Examples of heteroaryl groups include pyridyl, furyl or furanyl, imidazolyl, benzimidazolyl, pyrimidinyl, thiophenyl or thienyl, quinolinyl, indolyl, thiazolyl, and the like. The term “heteroarylalkyl” or the term “heteroaralkyl” refers to an alkyl substituted with a heteroaryl. The term “heteroarylalkoxy” refers to an alkoxy substituted with heteroaryl.

[0229] The term “heterocyclyl” refers to a nonaromatic 5-8 membered monocyclic, 8-12 membered bicyclic, or 11-14 membered tricyclic ring system having 1-3 heteroatoms if monocyclic, 1-6 heteroatoms if bicyclic, or 1-9 heteroatoms if tricyclic, said heteroatoms selected from O, N, or S (e.g., carbon atoms and 1-3, 1-6, or 1-9 heteroatoms of N, O, or S if monocyclic, bicyclic, or tricyclic, respectively), wherein 0, 1, 2 or 3 atoms of each ring may be substituted by a substituent. Examples of heterocyclyl groups include trizolyl, tetrazolyl, piperazinyl, pyrrolidinyl, dioxanyl, morpholinyl, tetrahydrofuranyl, and the like.

[0230] The term “oxo” refers to an oxygen atom, which forms a carbonyl when attached to carbon, an N-oxide when attached to nitrogen, and a sulfoxide or sulfone when attached to sulfur.

[0231] The term “acyl” refers to an alkylcarbonyl, cycloalkylcarbonyl, arylcarbonyl, heterocyclylcarbonyl, or heteroarylcarbonyl substituent, any of which may be further substituted by substituents.

[0232] The term “substituted” refers to the replacement of one or more hydrogen radicals in a given structure with the radical of a specified substituent including, but not limited to: halo, alkyl, alkenyl, alkynyl, aryl, heterocyclyl, thiol, alkylthio, arylthio, alkylthioalkyl, arylthioalkyl, alkylsulfonyl, alkylsulfonylalkyl, arylsulfonylalkyl, alkoxy, aryloxy, aralkoxy, aminocarbonyl, alkylaminocarbonyl, arylaminocarbonyl, alkoxycarbonyl, aryloxycarbonyl, haloalkyl, amino, trifluoromethyl, cyano, nitro, alkylamino, arylamino, alkylaminoalkyl, arylaminoalkyl, aminoalkylamino, hydroxy, alkoxyalkyl, carboxyalkyl, alkoxycarbonylalkyl, aminocarbonylalkyl, acyl, aralkoxycarbonyl, carboxylic acid, sulfonic acid, sulfonyl, phosphonic acid, aryl, heteroaryl, heterocyclic, and aliphatic. It is understood that the substituent can be further substituted.

### Cleavable Linking Groups

[0233] A cleavable linking group is one which is sufficiently stable outside the cell, but which upon entry into a target cell is cleaved to release the two parts the linker is holding together. In a preferred embodiment, the cleavable linking group is cleaved at least 10 times or more, preferably at least 100 times faster in the target cell or under a first reference condition (which can, e.g., be selected to mimic or represent intracellular conditions) than in the blood of a subject, or under a second reference condition (which can, e.g., be selected to mimic or represent conditions found in the blood or serum).

[0234] Cleavable linking groups are susceptible to cleavage agents, e.g., pH, redox potential or the presence of degradative molecules. Generally, cleavage agents are more prevalent or found at higher levels or activities inside cells than in serum or blood. Examples of such degradative agents include: redox agents which are selected for particular substrates or which have no substrate specificity, including, e.g., oxidative or reductive enzymes or reductive agents such as mercaptans, present in cells, that can degrade a redox cleavable linking group by reduction; esterases; endosomes or agents that can create an acidic environment, e.g., those that result in a pH of five or lower; enzymes that can hydrolyze or degrade an acid cleavable linking group by acting as a general acid, peptidases (which can be substrate specific), and phosphatases.

[0235] A cleavable linkage group, such as a disulfide bond can be susceptible to pH. The pH of human serum is 7.4, while the average intracellular pH is slightly lower, ranging from about 7.1-7.3. Endosomes have a more acidic pH, in the range of 5.5-6.0, and lysosomes have an even more acidic pH at around 5.0. Some linkers will have a cleavable linking group that is cleaved at a preferred pH, thereby releasing the cationic lipid from the ligand inside the cell, or into the desired compartment of the cell.

[0236] A linker can include a cleavable linking group that is cleavable by a particular enzyme. The type of cleavable linking group incorporated into a linker can depend on the cell to be targeted. For example, liver targeting ligands can be linked to the cationic lipids through a linker that includes an ester group. Liver cells are rich in esterases, and therefore the linker will be cleaved more efficiently in liver cells than in cell types that are not esterase-rich. Other cell-types rich in esterases include cells of the lung, renal cortex, and testis.

[0237] Linkers that contain peptide bonds can be used when targeting cell types rich in peptidases, such as liver cells and synoviocytes.

[0238] In general, the suitability of a candidate cleavable linking group can be evaluated by testing the ability of a degradative agent (or condition) to cleave the candidate linking group. It will also be desirable to also test the candidate cleavable linking group for the ability to resist cleavage in the blood or when in contact with other non-target tissue. Thus one can determine the relative susceptibility to cleavage between a first and a second condition, where the first is selected to be indicative of cleavage in a target cell and the second is selected to be indicative of cleavage in other tissues or biological fluids, e.g., blood or serum. The evaluations can be carried out in cell free systems, in cells, in cell culture, in organ or tissue culture, or in whole animals. It may be useful to make initial evaluations in cell-free or culture conditions and to confirm by further evaluations in whole animals. In preferred embodiments, useful candidate compounds are cleaved at least 2, 4, 10 or 100 times faster in the cell (or under in vitro conditions selected to mimic intracellular conditions) as compared to blood or serum (or under in vitro conditions selected to mimic extracellular conditions).

### Redox Cleavable Linking Groups

[0239] One class of cleavable linking groups are redox cleavable linking groups that are cleaved upon reduction or oxidation. An example of reductively cleavable linking group is a disulphide linking group (—S—S—). To determine if a candidate cleavable linking group is a suitable “reductively cleavable linking group,” or for example is suitable for use with a particular iRNA moiety and particular targeting agent one can look to methods described herein. For example, a candidate can be evaluated by incubation with dithiothreitol (DTT), or other reducing agent using reagents know in the art, which mimic the rate of cleavage which would be observed in a cell, e.g., a target cell. The candidates can also be evaluated under conditions which are selected to mimic blood or serum conditions. In a preferred embodiment, candidate compounds are cleaved by at most 10% in the blood. In preferred embodiments, useful candidate compounds are degraded at least 2, 4, 10 or 100 times faster in the cell (or under in vitro conditions selected to mimic intracellular conditions) as compared to blood (or under in vitro conditions selected to mimic extracellular conditions). The rate of cleavage of candidate compounds can be determined using standard enzyme kinetics assays under conditions chosen to mimic intracellular media and compared to conditions chosen to mimic extracellular media.

### Phosphate-Based Cleavable Linking Groups

[0240] Phosphate-based cleavable linking groups are cleaved by agents that degrade or hydrolyze the phosphate group. An example of an agent that cleaves phosphate groups in cells are enzymes such as phosphatases in cells. Examples of phosphate-based linking groups are —O—P(O)(ORk)-O—, —O—P(S)(ORk)-O—, —O—P(S)(SRk)-O—, —S—P(O)(ORk)-O—, —O—P(O)(ORk)-S—, —S—P(O)(ORk)-S—, —O—P(S)(ORk)-S—, —S—P(S)(ORk)-O—, —O—P(O)(Rk)-O—, —O—P(S)(Rk)-O—, —S—P(O)(Rk)-O—, —S—P(S)(Rk)-O—, —S—P(O)(Rk)-S—, —O—P(S)(Rk)-S—. Preferred embodiments are —O—P(O)(OH)—O—, —O—P(S)(OH)—O—, —O—P(S)(SH)—O—, —S—P(O)(OH)—O—, —O—P(O)(OH)—S—, —S—P(O)(OH)—S—, —O—P(S)(OH)—S—, —S—P(S)(OH)—O—, —O—P(O)(H)—O—, —O—P(S)(H)—O—, —S—P(O)(H)—O—, —S—P(S)(H)—O—, —S—P(O)(H)—S—, —O—P(S)(H)—S—. A preferred embodiment is —O—P(O)(OH)—O—. These candidates can be evaluated using methods analogous to those described above.

### Acid Cleavable Linking Groups

[0241] Acid cleavable linking groups are linking groups that are cleaved under acidic conditions. In preferred embodiments acid cleavable linking groups are cleaved in an acidic environment with a pH of about 6.5 or lower (e.g., about 6.0, 5.5, 5.0, or lower), or by agents such as enzymes that can act as a general acid. In a cell, specific low pH organelles, such as endosomes and lysosomes can provide a cleaving environment for acid cleavable linking groups. Examples of acid cleavable linking groups include but are not limited to hydrazones, esters, and esters of amino acids. Acid cleavable groups can have the general formula —C═NN—, C(O)O, or —OC(O). A preferred embodiment is when the carbon attached to the oxygen of the ester (the alkoxy group) is an aryl group, substituted alkyl group, or tertiary alkyl group such as dimethyl pentyl or t-butyl. These candidates can be evaluated using methods analogous to those described above.

### Ester-Based Linking Groups

[0242] Ester-based cleavable linking groups are cleaved by enzymes such as esterases and amidases in cells. Examples of ester-based cleavable linking groups include but are not limited to esters of alkylene, alkenylene and alkynylene groups. Ester cleavable linking groups have the general formula —C(O)O—, or —OC(O)—. These candidates can be evaluated using methods analogous to those described above.

### Peptide-Based Cleaving Groups

[0243] Peptide-based cleavable linking groups are cleaved by enzymes such as peptidases and proteases in cells. Peptide-based cleavable linking groups are peptide bonds formed between amino acids to yield oligopeptides (e.g., dipeptides, tripeptides etc.) and polypeptides. Peptide-based cleavable groups do not include the amide group (—C(O)NH—). The amide group can be formed between any alkylene, alkenylene or alkynelene. A peptide bond is a special type of amide bond formed between amino acids to yield peptides and proteins. The peptide based cleavage group is generally limited to the peptide bond (i.e., the amide bond) formed between amino acids yielding peptides and proteins and does not include the entire amide functional group. Peptide-based cleavable linking groups have the general formula —NHCHR^{A}C(O)NHCHR^{B}C(O)—, where R^{A} and R^{B} are the R groups of the two adjacent amino acids. These candidates can be evaluated using methods analogous to those described above. As used herein, “carbohydrate” refers to a compound which is either a carbohydrate per se made up of one or more monosaccharide units having at least 6 carbon atoms (which may be linear, branched or cyclic) with an oxygen, nitrogen or sulfur atom bonded to each carbon atom; or a compound having as a part thereof a carbohydrate moiety made up of one or more monosaccharide units each having at least six carbon atoms (which may be linear, branched or cyclic), with an oxygen, nitrogen or sulfur atom bonded to each carbon atom. Representative carbohydrates include the sugars (mono-, di-, tri- and oligosaccharides containing from about 4-9 monosaccharide units), and polysaccharides such as starches, glycogen, cellulose and polysaccharide gums. Specific monosaccharides include C₅ and above (preferably C₅-C₈) sugars; di- and trisaccharides include sugars having two or three monosaccharide units (preferably C₅-C₈).

### Alternative Embodiments

[0244] In another embodiment, the invention relates to a dsRNA agent capable of inhibiting the expression of a target gene. The dsRNA agent comprises a sense strand and an antisense strand, each strand having 14 to 30 nucleotides. The sense strand contains at least one motif of three identical modifications on three consecutive nucleotides, where at least one of the motifs occurs at or near the cleavage site in the antisense strand. Every nucleotide in the sense strand and antisense strand has been modified. The modifications on sense strand and antisense strand each independently comprises at least two different modifications.

[0245] In another embodiment, the invention relates to a dsRNA agent capable of inhibiting the expression of a target gene. The dsRNA agent comprises a sense strand and an antisense strand, each strand having 14 to 30 nucleotides. The sense strand contains at least one motif of three identical modifications on three consecutive nucleotides, where at least one of the motifs occurs at or near the cleavage site in the antisense strand. The antisense strand contains at least one motif of three identical modifications on three consecutive nucleotides. The modification pattern of the antisense strand is shifted by one or more nucleotides relative to the modification pattern of the sense strand.

[0246] In another embodiment, the invention relates to a dsRNA agent capable of inhibiting the expression of a target gene. The dsRNA agent comprises a sense strand and an antisense strand, each strand having 14 to 30 nucleotides. The sense strand contains at least two motifs of three identical modifications on three consecutive nucleotides, when at least one of the motifs occurs at the cleavage site in the strand and at least one of the motifs occurs at another portion of the strand that is separated from the motif at the cleavage site by at least one nucleotide. The antisense strand contains at least one motif of three identical modifications on three consecutive nucleotides, where at least one of the motifs occurs at or near the cleavage site in the strand and at least one of the motifs occurs at another portion of the strand that is separated from the motif at or near cleavage site by at least one nucleotide.

[0247] In another embodiment, the invention relates to a dsRNA agent capable of inhibiting the expression of a target gene. The dsRNA agent comprises a sense strand and an antisense strand, each strand having 14 to 30 nucleotides. The sense strand contains at least two motifs of three identical modifications on three consecutive nucleotides, where at least one of the motifs occurs at the cleavage site in the strand and at least one of the motifs occurs at another portion of the strand that is separated from the motif at the cleavage site by at least one nucleotide. The antisense strand contains at least one motif of three identical modifications on three consecutive nucleotides, where at least one of the motifs occurs at or near the cleavage site in the strand and at least one of the motifs occurs at another portion of the strand that is separated from the motif at or near cleavage site by at least one nucleotide. The modification in the motif occurring at the cleavage site in the sense strand is different than the modification in the motif occurring at or near the cleavage site in the antisense strand. In another embodiment, the invention relates to a dsRNA agent capable of inhibiting the expression of a target gene. The dsRNA agent comprises a sense strand and an antisense strand, each strand having 12 to 30 nucleotides. The sense strand contains at least one motif of three 2′-F modifications on three consecutive nucleotides, where at least one of the motifs occurs at the cleavage site in the strand. The antisense strand contains at least one motif of three 2′-O-methyl modifications on three consecutive nucleotides.

[0248] The sense strand may further comprises one or more motifs of three identical modifications on three consecutive nucleotides, where the one or more additional motifs occur at another portion of the strand that is separated from the three 2′-F modifications at the cleavage site by at least one nucleotide. The antisense strand may further comprises one or more motifs of three identical modifications on three consecutive nucleotides, where the one or more additional motifs occur at another portion of the strand that is separated from the three 2′-O-methyl modifications by at least one nucleotide. At least one of the nucleotides having a 2′-F modification may form a base pair with one of the nucleotides having a 2′-O-methyl modification.

[0249] In one embodiment, the dsRNA of the invention is administered in buffer.

[0250] In one embodiment, siRNA compounds described herein can be formulated for administration to a subject. A formulated siRNA composition can assume a variety of states. In some examples, the composition is at least partially crystalline, uniformly crystalline, and/or anhydrous (e.g., less than 80, 50, 30, 20, or 10% water). In another example, the siRNA is in an aqueous phase, e.g., in a solution that includes water.

[0251] The aqueous phase or the crystalline compositions can, e.g., be incorporated into a delivery vehicle, e.g., a liposome (particularly for the aqueous phase) or a particle (e.g., a microparticle as can be appropriate for a crystalline composition). Generally, the siRNA composition is formulated in a manner that is compatible with the intended method of administration, as described herein. For example, in particular embodiments the composition is prepared by at least one of the following methods: spray drying, lyophilization, vacuum drying, evaporation, fluid bed drying, or a combination of these techniques; or sonication with a lipid, freeze-drying, condensation and other self-assembly.

[0252] A siRNA preparation can be formulated in combination with another agent, e.g., another therapeutic agent or an agent that stabilizes a siRNA, e.g., a protein that complexes with siRNA to form an iRNP. Still other agents include chelators, e.g., EDTA (e.g., to remove divalent cations such as Mg²⁺), salts, RNAse inhibitors (e.g., a broad specificity RNAse inhibitor such as RNAsin) and so forth.

[0253] In one embodiment, the siRNA preparation includes another siNA compound, e.g., a second siRNA that can mediate RNAi with respect to a second gene, or with respect to the same gene. Still other preparation can include at least 3, 5, ten, twenty, fifty, or a hundred or more different siRNA species. Such siRNAs can mediate RNAi with respect to a similar number of different genes.

[0254] In one embodiment, the siRNA preparation includes at least a second therapeutic agent (e.g., an agent other than a RNA or a DNA). For example, a siRNA composition for the treatment of a viral disease, e.g., HIV, might include a known antiviral agent (e.g., a protease inhibitor or reverse transcriptase inhibitor). In another example, a siRNA composition for the treatment of a cancer might further comprise a chemotherapeutic agent.

[0255] Exemplary formulations are discussed below.

[0256] Liposomes. For ease of exposition the formulations, compositions and methods in this section are discussed largely with regard to unmodified siRNA compounds. It may be understood, however, that these formulations, compositions and methods can be practiced with other siRNA compounds, e.g., modified siRNAs, and such practice is within the invention. An siRNA compound, e.g., a double-stranded siRNA compound, or ssiRNA compound, (e.g., a precursor, e.g., a larger siRNA compound which can be processed into a ssiRNA compound, or a DNA which encodes an siRNA compound, e.g., a double-stranded siRNA compound, or ssiRNA compound, or precursor thereof) preparation can be formulated for delivery in a membranous molecular assembly, e.g., a liposome or a micelle. As used herein, the term “liposome” refers to a vesicle composed of amphiphilic lipids arranged in at least one bilayer, e.g., one bilayer or a plurality of bilayers. Liposomes include unilamellar and multilamellar vesicles that have a membrane formed from a lipophilic material and an aqueous interior. The aqueous portion contains the siRNA composition. The lipophilic material isolates the aqueous interior from an aqueous exterior, which typically does not include the siRNA composition, although in some examples, it may. Liposomes are useful for the transfer and delivery of active ingredients to the site of action. Because the liposomal membrane is structurally similar to biological membranes, when liposomes are applied to a tissue, the liposomal bilayer fuses with bilayer of the cellular membranes. As the merging of the liposome and cell progresses, the internal aqueous contents that include the siRNA are delivered into the cell where the siRNA can specifically bind to a target RNA and can mediate RNAi. In some cases the liposomes are also specifically targeted, e.g., to direct the siRNA to particular cell types.

[0257] A liposome containing a siRNA can be prepared by a variety of methods. In one example, the lipid component of a liposome is dissolved in a detergent so that micelles are formed with the lipid component. For example, the lipid component can be an amphipathic cationic lipid or lipid conjugate. The detergent can have a high critical micelle concentration and may be nonionic. Exemplary detergents include cholate, CHAPS, octylglucoside, deoxycholate, and lauroyl sarcosine. The siRNA preparation is then added to the micelles that include the lipid component. The cationic groups on the lipid interact with the siRNA and condense around the siRNA to form a liposome. After condensation, the detergent is removed, e.g., by dialysis, to yield a liposomal preparation of siRNA.

[0258] If necessary a carrier compound that assists in condensation can be added during the condensation reaction, e.g., by controlled addition. For example, the carrier compound can be a polymer other than a nucleic acid (e.g., spermine or spermidine). pH can also adjusted to favor condensation.

[0259] Further description of methods for producing stable polynucleotide delivery vehicles, which incorporate a polynucleotide/cationic lipid complex as structural components of the delivery vehicle, are described in, e.g., WO 96/37194. Liposome formation can also include one or more aspects of exemplary methods described in Felgner, P. L. et al., Proc. Natl. Acad. Sci., USA 8:7413-7417, 1987; U.S. Pat. Nos. 4,897,355; 5,171,678; Bangham, et al. M. Mol. Biol. 23:238, 1965; Olson, et al. Biochim. Biophys. Acta 557:9, 1979; Szoka, et al. Proc. Natl. Acad. Sci. 75:4194, 1978; Mayhew, et al. Biochim. Biophys. Acta 775:169, 1984; Kim, et al. Biochim. Biophys. Acta 728:339, 1983; and Fukunaga, et al. Endocrinol. 115:757, 1984. Commonly used techniques for preparing lipid aggregates of appropriate size for use as delivery vehicles include sonication and freeze-thaw plus extrusion (see, e.g., Mayer, et al. Biochim. Biophys. Acta 858:161, 1986). Microfluidization can be used when consistently small (50 to 200 nm) and relatively uniform aggregates are desired (Mayhew, et al. Biochim. Biophys. Acta 775:169, 1984). These methods are readily adapted to packaging siRNA preparations into liposomes.

[0260] Liposomes that are pH-sensitive or negatively-charged entrap nucleic acid molecules rather than complex with them. Since both the nucleic acid molecules and the lipid are similarly charged, repulsion rather than complex formation occurs. Nevertheless, some nucleic acid molecules are entrapped within the aqueous interior of these liposomes. pH-sensitive liposomes have been used to deliver DNA encoding the thymidine kinase gene to cell monolayers in culture. Expression of the exogenous gene was detected in the target cells (Zhou et al., Journal of Controlled Release, 19, (1992) 269-274).

[0261] One major type of liposomal composition includes phospholipids other than naturally-derived phosphatidylcholine. Neutral liposome compositions, for example, can be formed from dimyristoyl phosphatidylcholine (DMPC) or dipalmitoyl phosphatidylcholine (DPPC). Anionic liposome compositions generally are formed from dimyristoyl phosphatidylglycerol, while anionic fusogenic liposomes are formed primarily from dioleoyl phosphatidylethanolamine (DOPE). Another type of liposomal composition is formed from phosphatidylcholine (PC) such as, for example, soybean PC, and egg PC. Another type is formed from mixtures of phospholipid and/or phosphatidylcholine and/or cholesterol.

[0262] Examples of other methods to introduce liposomes into cells in vitro and include U.S. Pat. Nos. 5,283,185; 5,171,678; WO 94/00569; WO 93/24640; WO 91/16024; Felgner, J. Biol. Chem. 269:2550, 1994; Nabel, Proc. Natl. Acad. Sci. 90:11307, 1993; Nabel, Human Gene Ther. 3:649, 1992; Gershon, Biochem. 32:7143, 1993; and Strauss EMBO J. 11:417, 1992.

[0263] In one embodiment, cationic liposomes are used. Cationic liposomes possess the advantage of being able to fuse to the cell membrane. Non-cationic liposomes, although not able to fuse as efficiently with the plasma membrane, are taken up by macrophages in vivo and can be used to deliver siRNAs to macrophages.

[0264] Further advantages of liposomes include: liposomes obtained from natural phospholipids are biocompatible and biodegradable; liposomes can incorporate a wide range of water and lipid soluble drugs; liposomes can protect encapsulated siRNAs in their internal compartments from metabolism and degradation (Rosoff, in “Pharmaceutical Dosage Forms,” Lieberman, Rieger and Banker (Eds.), 1988, volume 1, p. 245). Important considerations in the preparation of liposome formulations are the lipid surface charge, vesicle size and the aqueous volume of the liposomes.

[0265] A positively charged synthetic cationic lipid, N-[1-(2,3-dioleyloxy)propyl]-N,N,N-trimethylammonium chloride (DOTMA) can be used to form small liposomes that interact spontaneously with nucleic acid to form lipid-nucleic acid complexes which are capable of fusing with the negatively charged lipids of the cell membranes of tissue culture cells, resulting in delivery of siRNA (see, e.g., Felgner, P. L. et al., Proc. Natl. Acad. Sci., USA 8:7413-7417, 1987 and U.S. Pat. No. 4,897,355 for a description of DOTMA and its use with DNA).

[0266] A DOTMA analogue, 1,2-bis(oleoyloxy)-3-(trimethylammonia)propane (DOTAP) can be used in combination with a phospholipid to form DNA-complexing vesicles. Lipofectin™ Bethesda Research Laboratories, Gaithersburg, Md.) is an effective agent for the delivery of highly anionic nucleic acids into living tissue culture cells that comprise positively charged DOTMA liposomes which interact spontaneously with negatively charged polynucleotides to form complexes. When enough positively charged liposomes are used, the net charge on the resulting complexes is also positive. Positively charged complexes prepared in this way spontaneously attach to negatively charged cell surfaces, fuse with the plasma membrane, and efficiently deliver functional nucleic acids into, for example, tissue culture cells. Another commercially available cationic lipid, 1,2-bis(oleoyloxy)-3,3-(trimethylammonia)propane (“DOTAP”) (Boehringer Mannheim, Indianapolis, Indiana) differs from DOTMA in that the oleoyl moieties are linked by ester, rather than ether linkages.

[0267] Other reported cationic lipid compounds include those that have been conjugated to a variety of moieties including, for example, carboxyspermine which has been conjugated to one of two types of lipids and includes compounds such as 5-carboxyspermylglycine dioctaoleoylamide (“DOGS”) (Transfectam™, Promega, Madison, Wisconsin) and dipalmitoylphosphatidylethanolamine 5-carboxyspermyl-amide (“DPPES”) (see, e.g., U.S. Pat. No. 5,171,678).

[0268] Another cationic lipid conjugate includes derivatization of the lipid with cholesterol (“DC-Chol”) which has been formulated into liposomes in combination with DOPE (See, Gao, X. and Huang, L., Biochim. Biophys. Res. Commun. 179:280, 1991). Lipopolylysine, made by conjugating polylysine to DOPE, has been reported to be effective for transfection in the presence of serum (Zhou, X. et al., Biochim. Biophys. Acta 1065:8, 1991). For certain cell lines, these liposomes containing conjugated cationic lipids, are said to exhibit lower toxicity and provide more efficient transfection than the DOTMA-containing compositions. Other commercially available cationic lipid products include DMRIE and DMRIE-HP (Vical, La Jolla, California) and Lipofectamine (DOSPA) (Life Technology, Inc., Gaithersburg, Maryland). Other cationic lipids suitable for the delivery of oligonucleotides are described in WO 98/39359 and WO 96/37194.

[0269] Liposomal formulations are particularly suited for topical administration, liposomes present several advantages over other formulations. Such advantages include reduced side effects related to high systemic absorption of the administered drug, increased accumulation of the administered drug at the desired target, and the ability to administer siRNA, into the skin. In some implementations, liposomes are used for delivering siRNA to epidermal cells and also to enhance the penetration of siRNA into dermal tissues, e.g., into skin. For example, the liposomes can be applied topically. Topical delivery of drugs formulated as liposomes to the skin has been documented (see, e.g., Weiner et al., Journal of Drug Targeting, 1992, vol. 2,405-410 and du Plessis et al., Antiviral Research, 18, 1992, 259-265; Mannino, R. J. and Fould-Fogerite, S., Biotechniques 6:682-690, 1988; Itani, T. et al. Gene 56:267-276. 1987; Nicolau, C. et al. Meth. Enz. 149:157-176, 1987; Straubinger, R. M. and Papahadjopoulos, D. Meth. Enz. 101:512-527, 1983; Wang, C. Y. and Huang, L., Proc. Natl. Acad. Sci. USA 84:7851-7855, 1987).

[0270] Non-ionic liposomal systems have also been examined to determine their utility in the delivery of drugs to the skin, in particular systems comprising non-ionic surfactant and cholesterol. Non-ionic liposomal formulations comprising Novasome I (glyceryl dilaurate/cholesterol/polyoxyethylene-10-stearyl ether) and Novasome II (glyceryl distearate/cholesterol/polyoxyethylene-10-stearyl ether) were used to deliver a drug into the dermis of mouse skin. Such formulations with siRNA are useful for treating a dermatological disorder.

[0271] Liposomes that include siRNA can be made highly deformable. Such deformability can enable the liposomes to penetrate through pore that are smaller than the average radius of the liposome. For example, transfersomes are a type of deformable liposomes. Transferosomes can be made by adding surface edge activators, usually surfactants, to a standard liposomal composition. Transfersomes that include siRNA can be delivered, for example, subcutaneously by infection in order to deliver siRNA to keratinocytes in the skin. In order to cross intact mammalian skin, lipid vesicles must pass through a series of fine pores, each with a diameter less than 50 nm, under the influence of a suitable transdermal gradient. In addition, due to the lipid properties, these transferosomes can be self-optimizing (adaptive to the shape of pores, e.g., in the skin), self-repairing, and can frequently reach their targets without fragmenting, and often self-loading.

[0272] Other formulations amenable to the present invention are described in U.S. provisional application Ser. No. 61/018,616, filed Jan. 2, 2008; 61/018,611, filed Jan. 2, 2008; 61/039,748, filed Mar. 26, 2008; 61/047,087, filed Apr. 22, 2008 and 61/051,528, filed May 8, 2008. PCT application no PCT/US2007/080331, filed Oct. 3, 2007 also describes formulations that are amenable to the present invention.

[0273] Surfactants. For ease of exposition the formulations, compositions and methods in this section are discussed largely with regard to unmodified siRNA compounds. It may be understood, however, that these formulations, compositions and methods can be practiced with other siRNA compounds, e.g., modified siRNA compounds, and such practice is within the scope of the invention. Surfactants find wide application in formulations such as emulsions (including microemulsions) and liposomes (see above). siRNA (or a precursor, e.g., a larger dsiRNA which can be processed into a siRNA, or a DNA which encodes a siRNA or precursor) compositions can include a surfactant. In one embodiment, the siRNA is formulated as an emulsion that includes a surfactant. The most common way of classifying and ranking the properties of the many different types of surfactants, both natural and synthetic, is by the use of the hydrophile/lipophile balance (HLB). The nature of the hydrophilic group provides the most useful means for categorizing the different surfactants used in formulations (Rieger, in “Pharmaceutical Dosage Forms,” Marcel Dekker, Inc., New York, NY, 1988, p. 285).

[0274] If the surfactant molecule is not ionized, it is classified as a nonionic surfactant. Nonionic surfactants find wide application in pharmaceutical products and are usable over a wide range of pH values. In general their HLB values range from 2 to about 18 depending on their structure. Nonionic surfactants include nonionic esters such as ethylene glycol esters, propylene glycol esters, glyceryl esters, polyglyceryl esters, sorbitan esters, sucrose esters, and ethoxylated esters. Nonionic alkanolamides and ethers such as fatty alcohol ethoxylates, propoxylated alcohols, and ethoxylated/propoxylated block polymers are also included in this class. The polyoxyethylene surfactants are the most popular members of the nonionic surfactant class.

[0275] If the surfactant molecule carries a negative charge when it is dissolved or dispersed in water, the surfactant is classified as anionic. Anionic surfactants include carboxylates such as soaps, acyl lactylates, acyl amides of amino acids, esters of sulfuric acid such as alkyl sulfates and ethoxylated alkyl sulfates, sulfonates such as alkyl benzene sulfonates, acyl isethionates, acyl taurates and sulfosuccinates, and phosphates. The most important members of the anionic surfactant class are the alkyl sulfates and the soaps.

[0276] If the surfactant molecule carries a positive charge when it is dissolved or dispersed in water, the surfactant is classified as cationic. Cationic surfactants include quaternary ammonium salts and ethoxylated amines. The quaternary ammonium salts are the most used members of this class.

[0277] If the surfactant molecule has the ability to carry either a positive or negative charge, the surfactant is classified as amphoteric. Amphoteric surfactants include acrylic acid derivatives, substituted alkylamides, N-alkylbetaines and phosphatides.

[0278] The use of surfactants in drug products, formulations and in emulsions has been reviewed (Rieger, in “Pharmaceutical Dosage Forms,” Marcel Dekker, Inc., New York, NY, 1988, p. 285).

[0279] Micelles and other Membranous Formulations. For ease of exposition the micelles and other formulations, compositions and methods in this section are discussed largely with regard to unmodified siRNA compounds. It may be understood, however, that these micelles and other formulations, compositions and methods can be practiced with other siRNA compounds, e.g., modified siRNA compounds, and such practice is within the invention. The siRNA compound, e.g., a double-stranded siRNA compound, or ssiRNA compound, (e.g., a precursor, e.g., a larger siRNA compound which can be processed into a ssiRNA compound, or a DNA which encodes an siRNA compound, e.g., a double-stranded siRNA compound, or ssiRNA compound, or precursor thereof)) composition can be provided as a micellar formulation. “Micelles” are defined herein as a particular type of molecular assembly in which amphipathic molecules are arranged in a spherical structure such that all the hydrophobic portions of the molecules are directed inward, leaving the hydrophilic portions in contact with the surrounding aqueous phase. The converse arrangement exists if the environment is hydrophobic.

[0280] A mixed micellar formulation suitable for delivery through transdermal membranes may be prepared by mixing an aqueous solution of the siRNA composition, an alkali metal C₈ to C₂₂ alkyl sulphate, and a micelle forming compounds. Exemplary micelle forming compounds include lecithin, hyaluronic acid, pharmaceutically acceptable salts of hyaluronic acid, glycolic acid, lactic acid, chamomile extract, cucumber extract, oleic acid, linoleic acid, linolenic acid, monoolein, monooleates, monolaurates, borage oil, evening of primrose oil, menthol, trihydroxy oxo cholanyl glycine and pharmaceutically acceptable salts thereof, glycerin, polyglycerin, lysine, polylysine, triolein, polyoxyethylene ethers and analogues thereof, polidocanol alkyl ethers and analogues thereof, chenodeoxycholate, deoxycholate, and mixtures thereof. The micelle forming compounds may be added at the same time or after addition of the alkali metal alkyl sulphate. Mixed micelles will form with substantially any kind of mixing of the ingredients but vigorous mixing in order to provide smaller size micelles.

[0281] In one method a first micellar composition is prepared which contains the siRNA composition and at least the alkali metal alkyl sulphate. The first micellar composition is then mixed with at least three micelle forming compounds to form a mixed micellar composition. In another method, the micellar composition is prepared by mixing the siRNA composition, the alkali metal alkyl sulphate and at least one of the micelle forming compounds, followed by addition of the remaining micelle forming compounds, with vigorous mixing.

[0282] Phenol and/or m-cresol may be added to the mixed micellar composition to stabilize the formulation and protect against bacterial growth. Alternatively, phenol and/or m-cresol may be added with the micelle forming ingredients. An isotonic agent such as glycerin may also be added after formation of the mixed micellar composition.

[0283] For delivery of the micellar formulation as a spray, the formulation can be put into an aerosol dispenser and the dispenser is charged with a propellant. The propellant, which is under pressure, is in liquid form in the dispenser. The ratios of the ingredients are adjusted so that the aqueous and propellant phases become one, i.e., there is one phase. If there are two phases, it is necessary to shake the dispenser prior to dispensing a portion of the contents, e.g., through a metered valve. The dispensed dose of pharmaceutical agent is propelled from the metered valve in a fine spray.

[0284] Propellants may include hydrogen-containing chlorofluorocarbons, hydrogen-containing fluorocarbons, dimethyl ether and diethyl ether. In certain embodiments, HFA 134a (1,1,1,2 tetrafluoroethane) may be used.

[0285] The specific concentrations of the essential ingredients can be determined by relatively straightforward experimentation. For absorption through the oral cavities, it is often desirable to increase, e.g., at least double or triple, the dosage for through injection or administration through the gastrointestinal tract.

[0286] Particles. For ease of exposition the particles, formulations, compositions and methods in this section are discussed largely with regard to modified siRNA compounds. It may be understood, however, that these particles, formulations, compositions and methods can be practiced with other siRNA compounds, e.g., unmodified siRNA compounds, and such practice is within the invention. In another embodiment, an siRNA compound, e.g., a double-stranded siRNA compound, or ssiRNA compound, (e.g., a precursor, e.g., a larger siRNA compound which can be processed into a ssiRNA compound, or a DNA which encodes an siRNA compound, e.g., a double-stranded siRNA compound, or ssiRNA compound, or precursor thereof) preparations may be incorporated into a particle, e.g., a microparticle. Microparticles can be produced by spray-drying, but may also be produced by other methods including lyophilization, evaporation, fluid bed drying, vacuum drying, or a combination of these techniques.

### Pharmaceutical Compositions

[0287] The iRNA agents of the invention may be formulated for pharmaceutical use. Pharmaceutically acceptable compositions comprise a therapeutically-effective amount of one or more of the dsRNA agents in any of the preceding embodiments, taken alone or formulated together with one or more pharmaceutically acceptable carriers (additives), excipient and/or diluents.

[0288] The pharmaceutical compositions may be specially formulated for administration in solid or liquid form, including those adapted for the following: (1) oral administration, for example, drenches (aqueous or non-aqueous solutions or suspensions), tablets, e.g., those targeted for buccal, sublingual, and systemic absorption, boluses, powders, granules, pastes for application to the tongue; (2) parenteral administration, for example, by subcutaneous, intramuscular, intravenous or epidural injection as, for example, a sterile solution or suspension, or sustained-release formulation; (3) topical application, for example, as a cream, ointment, or a controlled-release patch or spray applied to the skin; (4) intravaginally or intrarectally, for example, as a pessary, cream or foam; (5) sublingually; (6) ocularly; (7) transdermally; or (8) nasally. Delivery using subcutaneous or intravenous methods can be particularly advantageous.

[0289] The phrase “therapeutically-effective amount” as used herein means that amount of a compound, material, or composition comprising a compound of the invention which is effective for producing some desired therapeutic effect in at least a sub-population of cells in an animal at a reasonable benefit/risk ratio applicable to any medical treatment.

[0290] The phrase “pharmaceutically acceptable” is employed herein to refer to those compounds, materials, compositions, and/or dosage forms which are, within the scope of sound medical judgment, suitable for use in contact with the tissues of human beings and animals without excessive toxicity, irritation, allergic response, or other problem or complication, commensurate with a reasonable benefit/risk ratio.

[0291] The phrase “pharmaceutically-acceptable carrier” as used herein means a pharmaceutically-acceptable material, composition or vehicle, such as a liquid or solid filler, diluent, excipient, manufacturing aid (e.g., lubricant, talc magnesium, calcium or zinc stearate, or steric acid), or solvent encapsulating material, involved in carrying or transporting the subject compound from one organ, or portion of the body, to another organ, or portion of the body. Each carrier must be “acceptable” in the sense of being compatible with the other ingredients of the formulation and not injurious to the patient. Some examples of materials which can serve as pharmaceutically-acceptable carriers include: (1) sugars, such as lactose, glucose and sucrose; (2) starches, such as corn starch and potato starch; (3) cellulose, and its derivatives, such as sodium carboxymethyl cellulose, ethyl cellulose and cellulose acetate; (4) powdered tragacanth; (5) malt; (6) gelatin; (7) lubricating agents, such as magnesium state, sodium lauryl sulfate and talc; (8) excipients, such as cocoa butter and suppository waxes; (9) oils, such as peanut oil, cottonseed oil, safflower oil, sesame oil, olive oil, corn oil and soybean oil; (10) glycols, such as propylene glycol; (11) polyols, such as glycerin, sorbitol, mannitol and polyethylene glycol; (12) esters, such as ethyl oleate and ethyl laurate; (13) agar; (14) buffering agents, such as magnesium hydroxide and aluminum hydroxide; (15) alginic acid; (16) pyrogen-free water; (17) isotonic saline; (18) Ringer's solution; (19) ethyl alcohol; (20) pH buffered solutions; (21) polyesters, polycarbonates and/or polyanhydrides; (22) bulking agents, such as polypeptides and amino acids (23) serum component, such as serum albumin, HDL and LDL; and (22) other non-toxic compatible substances employed in pharmaceutical formulations.

[0292] The formulations may conveniently be presented in unit dosage form and may be prepared by any methods well known in the art of pharmacy. The amount of active ingredient which can be combined with a carrier material to produce a single dosage form will vary depending upon the host being treated, the particular mode of administration. The amount of active ingredient which can be combined with a carrier material to produce a single dosage form will generally be that amount of the compound which produces a therapeutic effect. Generally, out of one hundred per cent, this amount will range from about 0.1 per cent to about ninety-nine percent of active ingredient, preferably from about 5 per cent to about 70 per cent, most preferably from about 10 per cent to about 30 per cent.

[0293] In certain embodiments, a formulation of the present invention comprises an excipient selected from the group consisting of cyclodextrins, celluloses, liposomes, micelle forming agents, e.g., bile acids, and polymeric carriers, e.g., polyesters and polyanhydrides; and a compound of the present invention. In certain embodiments, an aforementioned formulation renders orally bioavailable a compound of the present invention.

[0294] iRNA agent preparation can be formulated in combination with another agent, e.g., another therapeutic agent or an agent that stabilizes a iRNA, e.g., a protein that complexes with iRNA to form an iRNP. Still other agents include chelators, e.g., EDTA (e.g., to remove divalent cations such as Mg²⁺), salts, RNAse inhibitors (e.g., a broad specificity RNAse inhibitor such as RNAsin) and so forth.

[0295] Methods of preparing these formulations or compositions include the step of bringing into association a compound of the present invention with the carrier and, optionally, one or more accessory ingredients. In general, the formulations are prepared by uniformly and intimately bringing into association a compound of the present invention with liquid carriers, or finely divided solid carriers, or both, and then, if necessary, shaping the product.

[0296] In some cases, in order to prolong the effect of a drug, it is desirable to slow the absorption of the drug from subcutaneous or intramuscular injection. This may be accomplished by the use of a liquid suspension of crystalline or amorphous material having poor water solubility. The rate of absorption of the drug then depends upon its rate of dissolution which, in turn, may depend upon crystal size and crystalline form. Alternatively, delayed absorption of a parenterally-administered drug form is accomplished by dissolving or suspending the drug in an oil vehicle.

[0297] The compounds according to the invention may be formulated for administration in any convenient way for use in human or veterinary medicine, by analogy with other pharmaceuticals.

[0298] The term “treatment” is intended to encompass also prophylaxis, therapy and cure. The patient receiving this treatment is any animal in need, including primates, in particular humans, and other mammals such as equines, cattle, swine and sheep; and poultry and pets in general.

[0299] Double-stranded RNAi agents are produced in a cell in vivo, e.g., from exogenous DNA templates that are delivered into the cell. For example, the DNA templates can be inserted into vectors and used as gene therapy vectors. Gene therapy vectors can be delivered to a subject by, for example, intravenous injection, local administration (U.S. Pat. No. 5,328,470), or by stereotactic injection (see, e.g., Chen et al. (1994) Proc. Natl. Acad. Sci. USA 91:3054-3057). The pharmaceutical preparation of the gene therapy vector can include the gene therapy vector in an acceptable diluent, or can comprise a slow release matrix in which the gene delivery vehicle is imbedded. The DNA templates, for example, can include two transcription units, one that produces a transcript that includes the top strand of a dsRNA agent and one that produces a transcript that includes the bottom strand of a dsRNA agent. When the templates are transcribed, the dsRNA agent is produced, and processed into siRNA agent fragments that mediate gene silencing.

### Routes of Delivery

[0300] A composition that includes an iRNA can be delivered to a subject by a variety of routes. Exemplary routes include: intravenous, subcutaneous, topical, rectal, anal, vaginal, nasal, pulmonary, ocular.

[0301] The iRNA molecules of the invention can be incorporated into pharmaceutical compositions suitable for administration. Such compositions typically include one or more species of iRNA and a pharmaceutically acceptable carrier. As used herein the language “pharmaceutically acceptable carrier” is intended to include any and all solvents, dispersion media, coatings, antibacterial and antifungal agents, isotonic and absorption delaying agents, and the like, compatible with pharmaceutical administration. The use of such media and agents for pharmaceutically active substances is well known in the art. Except insofar as any conventional media or agent is incompatible with the active compound, use thereof in the compositions is contemplated. Supplementary active compounds can also be incorporated into the compositions.

[0302] The compositions of the present invention may be administered in a number of ways depending upon whether local or systemic treatment is desired and upon the area to be treated. Administration may be topical (including ophthalmic, vaginal, rectal, intranasal, transdermal), oral or parenteral. Parenteral administration includes intravenous drip, subcutaneous, intraperitoneal or intramuscular injection, or intrathecal or intraventricular administration.

[0303] The route and site of administration may be chosen to enhance targeting. For example, to target muscle cells, intramuscular injection into the muscles of interest would be a logical choice. Lung cells might be targeted by administering the iRNA in aerosol form. The vascular endothelial cells could be targeted by coating a balloon catheter with the iRNA and mechanically introducing the DNA.

### Dosage

[0304] In one aspect, the invention features a method of administering a dsRNA agent, e.g., a siRNA agent, to a subject (e.g., a human subject). The method includes administering a unit dose of the dsRNA agent, e.g., a siRNA agent, e.g., double stranded siRNA agent that (a) the double-stranded part is 14-30 nucleotides (nt) long, for example, 21-23 nt, (b) is complementary to a target RNA (e.g., an endogenous or pathogen target RNA), and, optionally, (c) includes at least one 3′ overhang 1-5 nucleotide long. In one embodiment, the unit dose is less than 10 mg per kg of bodyweight, or less than 10, 5, 2, 1, 0.5, 0.1, 0.05, 0.01, 0.005, 0.001, 0.0005, 0.0001, 0.00005 or 0.00001 mg per kg of bodyweight, and less than 200 nmole of RNA agent (e.g., about 4.4×10¹⁶ copies) per kg of bodyweight, or less than 1500, 750, 300, 150, 75, 15, 7.5, 1.5, 0.75, 0.15, 0.075, 0.015, 0.0075, 0.0015, 0.00075, 0.00015 nmole of RNA agent per kg of bodyweight.

[0305] The defined amount can be an amount effective to treat or prevent a disease or disorder, e.g., a disease or disorder associated with the target RNA. The unit dose, for example, can be administered by injection (e.g., intravenous, subcutaneous or intramuscular), an inhaled dose, or a topical application. In some embodiments dosages may be less than 10, 5, 2, 1, or 0.1 mg/kg of body weight.

[0306] In some embodiments, the unit dose is administered less frequently than once a day, e.g., less than every 2, 4, 8 or 30 days. In another embodiment, the unit dose is not administered with a frequency (e.g., not a regular frequency). For example, the unit dose may be administered a single time.

[0307] In one embodiment, the effective dose is administered with other traditional therapeutic modalities. In one embodiment, the subject has a viral infection and the modality is an antiviral agent other than a dsRNA agent, e.g., other than a siRNA agent. In another embodiment, the subject has atherosclerosis and the effective dose of a dsRNA agent, e.g., a siRNA agent, is administered in combination with, e.g., after surgical intervention, e.g., angioplasty.

[0308] In one embodiment, a subject is administered an initial dose and one or more maintenance doses of a dsRNA agent, e.g., a siRNA agent, (e.g., a precursor, e.g., a larger dsRNA agent which can be processed into a siRNA agent, or a DNA which encodes a dsRNA agent, e.g., a siRNA agent, or precursor thereof). The maintenance dose or doses can be the same or lower than the initial dose, e.g., one-half less of the initial dose. A maintenance regimen can include treating the subject with a dose or doses ranging from 0.01 μg to 15 mg/kg of body weight per day, e.g., 10, 1, 0.1, 0.01, 0.001, or 0.00001 mg per kg of bodyweight per day. The maintenance doses are, for example, administered no more than once every 2, 5, 10, or 30 days. Further, the treatment regimen may last for a period of time which will vary depending upon the nature of the particular disease, its severity and the overall condition of the patient. In certain embodiments the dosage may be delivered no more than once per day, e.g., no more than once per 24, 36, 48, or more hours, e.g., no more than once for every 5 or 8 days. Following treatment, the patient can be monitored for changes in his condition and for alleviation of the symptoms of the disease state. The dosage of the compound may either be increased in the event the patient does not respond significantly to current dosage levels, or the dose may be decreased if an alleviation of the symptoms of the disease state is observed, if the disease state has been ablated, or if undesired side-effects are observed.

[0309] The effective dose can be administered in a single dose or in two or more doses, as desired or considered appropriate under the specific circumstances. If desired to facilitate repeated or frequent infusions, implantation of a delivery device, e.g., a pump, semi-permanent stent (e.g., intravenous, intraperitoneal, intracisternal or intracapsular), or reservoir may be advisable.

[0310] In one embodiment, the composition includes a plurality of dsRNA agent species. In another embodiment, the dsRNA agent species has sequences that are non-overlapping and non-adjacent to another species with respect to a naturally occurring target sequence. In another embodiment, the plurality of dsRNA agent species is specific for different naturally occurring target genes. In another embodiment, the dsRNA agent is allele specific.

[0311] The dsRNA agents of the invention described herein can be administered to mammals, particularly large mammals such as nonhuman primates or humans in a number of ways.

[0312] In one embodiment, the administration of the dsRNA agent, e.g., a siRNA agent, composition is parenteral, e.g., intravenous (e.g., as a bolus or as a diffusible infusion), intradermal, intraperitoneal, intramuscular, intrathecal, intraventricular, intracranial, subcutaneous, transmucosal, buccal, sublingual, endoscopic, rectal, oral, vaginal, topical, pulmonary, intranasal, urethral or ocular. Administration can be provided by the subject or by another person, e.g., a health care provider. The medication can be provided in measured doses or in a dispenser which delivers a metered dose. Selected modes of delivery are discussed in more detail below.

[0313] The invention provides methods, compositions, and kits, for rectal administration or delivery of dsRNA agents described herein

### Methods of Inhibiting Expression of the Target Gene

[0314] Embodiments of the invention also relate to methods for inhibiting the expression of a target gene. The method comprises the step of administering the dsRNA agents in any of the preceding embodiments, in an amount sufficient to inhibit expression of the target gene.

[0315] Another aspect the invention relates to a method of modulating the expression of a target gene in a cell, comprising providing to said cell a dsRNA agent of this invention. In one embodiment, the target gene is selected from the group consisting of Factor VII, Eg5, PCSK9, TPX2, apoB, SAA, TTR, RSV, PDGF beta gene, Erb-B gene, Src gene, CRK gene, GRB2 gene, RAS gene, MEKK gene, JNK gene, RAF gene, Erk1/2 gene, PCNA (p21) gene, MYB gene, JUN gene, FOS gene, BCL-2 gene, hepciden, Activated Protein C, Cyclin D gene, VEGF gene, EGFR gene, Cyclin A gene, Cyclin E gene, WNT-1 gene, beta-catenin gene, c-MET gene, PKC gene, NFKB gene, STAT3 gene, survivin gene, Her2/Neu gene, topoisomerase I gene, topoisomerase II alpha gene, mutations in the p73 gene, mutations in the p21 (WAF1/CIP1) gene, mutations in the p27(KIP1) gene, mutations in the PPM1D gene, mutations in the RAS gene, mutations in the caveolin I gene, mutations in the MIB I gene, mutations in the MTAI gene, mutations in the M68 gene, mutations in tumor suppressor genes, and mutations in the p53 tumor suppressor gene.

[0316] The invention is further illustrated by the following examples, which should not be construed as further limiting. The contents of all references, pending patent applications and published patents, cited throughout this application are hereby expressly incorporated by reference.

### EXAMPLES

### Example 1. In Vitro Screening of siRNA Duplexes

### Cell Culture and Transfections

[0317] Human Hep3B cells or rat H.II.4.E cells (ATCC, Manassas, VA) were grown to near confluence at 37° C. in an atmosphere of 5% CO₂ in RPMI (ATCC) supplemented with 10% FBS, streptomycin, and glutamine (ATCC) before being released from the plate by trypsinization. Transfection was carried out by adding 14.8 μl of Opti-MEM plus 0.2 μl of Lipofectamine RNAiMax per well (Invitrogen, Carlsbad CA. cat #13778-150) to 5 μl of siRNA duplexes per well into a 96-well plate and incubated at room temperature for 15 minutes. 80 μl of complete growth media without antibiotic containing ˜2×10⁴ Hep3B cells were then added to the siRNA mixture. Cells were incubated for either 24 or 120 hours prior to RNA purification. Single dose experiments were performed at 10 nM and 0.1 nM final duplex concentration and dose response experiments were done using 8, 4 fold serial dilutions with a maximum dose of 10 nM final duplex concentration.

### Total RNA Isolation Using DYNABEADS mRNA Isolation Kit (Invitrogen, part #: 610-12)

[0318] Cells were harvested and lysed in 150 μl of Lysis/Binding Buffer then mixed for 5 minute at 850 rpm using an Eppendorf Thermomixer (the mixing speed was the same throughout the process). Ten microliters of magnetic beads and 80 μl Lysis/Binding Buffer mixture were added to a round bottom plate and mixed for 1 minute. Magnetic beads were captured using magnetic stand and the supernatant was removed without disturbing the beads. After removing supernatant, the lysed cells were added to the remaining beads and mixed for 5 minutes. After removing supernatant, magnetic beads were washed 2 times with 150 μl Wash Buffer A and mixed for 1 minute. Beads were capture again and supernatant removed. Beads were then washed with 150 μl Wash Buffer B, captured and supernatant was removed. Beads were next washed with 150 μl Elution Buffer, captured and supernatant removed. Beads were allowed to dry for 2 minutes. After drying, 50 μl of Elution Buffer was added and mixed for 5 minutes at 70° C. Beads were captured on magnet for 5 minutes. 40 μl of supernatant was removed and added to another 96 well plate.

### cDNA Synthesis Using ABI High Capacity cDNA Reverse Transcription Kit (Applied Biosystems, Foster City, CA, Cat #4368813)

[0319] A master mix of 1 μl 10× Buffer, 0.4 μl 25× dNTPs, 1 μl Random primers, 0.5 μl Reverse Transcriptase, 0.5 μl RNase inhibitor and 1.6 μl of H₂O per reaction were added into 5 μl total RNA. cDNA was generated using a Bio-Rad C-1000 or S-1000 thermal cycler (Hercules, CA) through the following steps: 25° C. 10 min, 37° C. 120 min, 85° C. 5 sec, 4° C. hold.

### Real Time PCR

[0320] 2 μl of cDNA were added to a master mix containing 0.5 μl GAPDH TaqMan Probe (Applied Biosystems Cat #4326317E (human) Cat #4308313 (rodent)), 0.5 μl TTR TaqMan probe (Applied Biosystems cat #HS00174914_m1 (human) cat #Rn00562124_m1 (rat)) and 5 μl Lightcycler 480 probe master mix (Roche Cat #04887301001) per well in a 384 well plate (Roche cat #04887301001). Real time PCR was done in a Roche LC 480 Real Time PCR machine (Roche). Each duplex was tested in at least two independent transfections and each transfection was assayed in duplicate, unless otherwise noted.

[0321] To calculate relative fold change, real time data were analyzed using the ΔΔCt method and normalized to assays performed with cells transfected with 10 nM AD-1955, or mock transfected cells. IC₅₀s were calculated using a 4 parameter fit model using XLFit and normalized to cells transfected with AD-1955 or naïve cells over the same dose range, or to its own lowest dose. IC₅₀s were calculated for each individual transfection as well as in combination, where a single IC₅₀ was fit to the data from both transfections.

[0322] The results of gene silencing of the exemplary siRNA duplex with various motif modifications of the invention are shown in the table below.

### Example 2. RNA Synthesis and Duplex Annealing

### 1. Oligonucleotide Synthesis

[0323] All oligonucleotides were synthesized on an AKTAoligopilot synthesizer or an ABI 394 synthsizer. Commercially available controlled pore glass solid support (dT-CPG, 500 \acute{Å}, Prime Synthesis) and RNA phosphoramidites with standard protecting groups, 5′-O-dimethoxytrityl N6-benzoyl-2′-t-butyldimethylsilyl-adenosine-3′-O-N,N′-diisopropyl-2-cyanoethylphosphoramidite, 5′-O-dimethoxytrityl-N4-acetyl-2′-t-butyldimethylsilyl-cytidine-3′-O—N,N′-diisopropyl-2-cyanoethylphosphoramidite, 5′-O-dimethoxytrityl-N2-isobutryl-2′-t-butyldimethylsilyl-guanosine-3′-O—N,N′-diisopropyl-2-cyanoethylphosphoramidite, and 5′-O-dimethoxytrityl-2′-t-butyldimethylsilyl-uridine-3′-O—N,N′-diisopropyl-2-cyanoethylphosphoramidite (Pierce Nucleic Acids Technologies) were used for the oligonucleotide synthesis unless otherwise specified. The 2′-F phosphoramidites, 5′-O-dimethoxytrityl-N4-acetyl-2′-fluro-cytidine-3′-O—N,N′-diisopropyl-2-cyanoethyl-phosphoramidite and 5′-O-dimethoxytrityl-2′-fluro-uridine-3′-O—N,N′-diisopropyl-2-cyanoethyl-phosphoramidite were purchased from (Promega). All phosphoramidites were used at a concentration of 0.2M in acetonitrile (CH₃CN) except for guanosine which was used at 0.2M concentration in 10% THF/ANC (v/v). Coupling/recycling time of 16 minutes was used. The activator was 5-ethyl thiotetrazole (0.75M, American International Chemicals), for the PO-oxidation Iodine/Water/Pyridine was used and the PS-oxidation PADS (2%) in 2,6-lutidine/ACN (1:1 v/v) was used.

[0324] Ligand conjugated strands were synthesized using solid support containing the corresponding ligand. For example, the introduction of carbohydrate moiety/ligand (for e.g., GalNAc) at the 3′-end of a sequence was achieved by starting the synthesis with the corresponding carbohydrate solid support. Similarly a cholesterol moiety at the 3′-end was introduced by starting the synthesis on the cholesterol support. In general, the ligand moiety was tethered to trans-4-hydroxyprolinol via a tether of choice as described in the previous examples to obtain a hydroxyprolinol-ligand moiety. The hydroxyprolinol-ligand moiety was then coupled to a solid support via a succinate linker or was converted to phosphoramidite via standard phosphitylation conditions to obtain the desired carbohydrate conjugate building blocks. Fluorophore labeled siRNAs were synthesized from the corresponding phosphoramidite or solid support, purchased from Biosearch Technologies. The oleyl lithocholic (GalNAc)₃ polymer support made in house at a loading of 38.6 μmol/gram. The Mannose (Man)₃ polymer support was also made in house at a loading of 42.0 μmol/gram.

[0325] Conjugation of the ligand of choice at desired position, for example at the 5′-end of the sequence, was achieved by coupling of the corresponding phosphoramidite to the growing chain under standard phosphoramidite coupling conditions unless otherwise specified. An extended 15 min coupling of 0.1M solution of phosphoramidite in anhydrous CH₃CN in the presence of 5-(ethylthio)-1H-tetrazole activator to a solid bound oligonucleotide. Oxidation of the internucleotide phosphite to the phosphate was carried out using standard iodine-water as reported (1) or by treatment with tert-butyl hydroperoxide/acetonitrile/water (10:87:3) with 10 min oxidation wait time conjugated oligonucleotide. Phosphorothioate was introduced by the oxidation of phosphite to phosphorothioate by using a sulfur transfer reagent such as DDTT (purchased from AM Chemicals), PADS and or Beaucage reagent The cholesterol phosphoramidite was synthesized in house, and used at a concentration of 0.1 M in dichloromethane. Coupling time for the cholesterol phosphoramidite was 16 minutes.

### 2. Deprotection-I (Nucleobase Deprotection)

[0326] After completion of synthesis, the support was transferred to a 100 ml glass bottle (VWR). The oligonucleotide was cleaved from the support with simultaneous deprotection of base and phosphate groups with 80 mL of a mixture of ethanolic ammonia [ammonia:ethanol (3:1)] for 6.5 h at 55° C. The bottle was cooled briefly on ice and then the ethanolic ammonia mixture was filtered into a new 250 ml bottle. The CPG was washed with 2×40 mL portions of ethanol/water (1:1 v/v). The volume of the mixture was then reduced to ˜30 ml by roto-vap. The mixture was then frozen on dry ice and dried under vacuum on a speed vac.

### 3. Deprotection-II (Removal of 2′ TBDMS Group)

[0327] The dried residue was resuspended in 26 ml of triethylamine, triethylamine trihydrofluoride (TEA.3HF) or pyridine-HF and DMSO (3:4:6) and heated at 60° C. for 90 minutes to remove the tert-butyldimethylsilyl (TBDMS) groups at the 2′ position. The reaction was then quenched with 50 ml of 20 mM sodium acetate and pH adjusted to 6.5, and stored in freezer until purification.

### 4. Analysis

[0328] The oligonucleotides were analyzed by high-performance liquid chromatography (HPLC) prior to purification and selection of buffer and column depends on nature of the sequence and or conjugated ligand.

### 5. HPLC Purification

[0329] The ligand conjugated oligonucleotides were purified reverse phase preparative HPLC. The unconjugated oligonucleotides were purified by anion-exchange HPLC on a TSK gel column packed in house. The buffers were 20 mM sodium phosphate (pH 8.5) in 10% CH₃CN (buffer A) and 20 mM sodium phosphate (pH 8.5) in 10% CH₃CN, 1M NaBr (buffer B). Fractions containing full-length oligonucleotides were pooled, desalted, and lyophilized. Approximately 0.15 OD of desalted oligonucleotides were diluted in water to 150 μl and then pipetted in special vials for CGE and LC/MS analysis. Compounds were finally analyzed by LC-ESMS and CGE.

### 6. siRNA Preparation

[0330] For the preparation of siRNA, equimolar amounts of sense and antisense strand were heated in 1×PBS at 95° C. for 5 min and slowly cooled to room temperature. Integrity of the duplex was confirmed by HPLC analysis.

TABLE 2
ANGPTL3 modified duplex

| | | | | | % of mRNA | | | |
|---|---|---|---|---|---|---|---|---|
| Duplex | | Sense strand (S) (SEQ ID NOS 5-424, | | Antisense strand(AS) (SEQ ID NOS 425-844, | remained conc, of siRNA | | | |
| ID | S ID | respectively, in order of appearance) | AS ID | respectively, in order of appearance) | 1 nM | 0.1 nM | 0.01 nM | IC50 (nM) |
| D1000 | S1000 | AfuGfuAfaCfcAfAfGfaGfuAfuUfcCfasu | AS1000 | AfUfgGfaAfuAfclIfcuuGfgUfuAfcAfusGfsa | 0.03 | 0.1 | 0.47 | 0.006 |
| D1001 | S1001 | AfsuGfuAfaCfcAfAfGfaGfuAfuucCfasUf | AS1001 | aUfsgGfAfAfuAfcUfcuuGfgUfuAfcAfusGfsa | 0.03 | 0.10 | 0.49 | 0.0065 |
| D1002 | S1002 | AfuGfuAfaCfcAfAfGfaGfuAfuucCfasUf | AS1002 | aUfgGfAfAfuAfcUfcuuGfgsUfuAfcAfusGfsa | 0.04 | 0.10 | 0.46 | 0.0068 |
| D1003 | S1003 | AfuGfuAfaCfcAfAfGfaGfuAfuucCfasUf | AS1003 | aUfgGfAfAfuAfcUfcuuGfgUfsuAfcAfusGfsa | 0.05 | 0.12 | 0.56 | 0.0073 |
| D1004 | S1004 | aUGuaACccAGagUAuuCCasu | AS1004 | AUggAAuaCUcuUGguUAcaUsGsa | 0.07 | 0.13 | 0.44 | 0.008 |
| D1005 | S1005 | AfuGfuAfaCfcAfAfGfaGfuAfuucCfasUf | AS1005 | aUfgGfAfAfuAfcUfcuuGfgsUfsuAfcAfusGfsa | 0.06 | 0.11 | 0.53 | 0.0093 |
| D1006 | S1006 | AfuGfuAfAfccAfAfGfaGfuAfuUfcCfasUf | AS1006 | aUfgGfaAfuAfcUfcuuGfGfuuAfcAfusGfsa | 0.05 | 0.16 | 0.55 | 0.0095 |
| D1007 | S1007 | AfuGfuAfAfCfcAfAfGfaGfuAfuUfcCfasUf | AS1007 | aUfgGfaAfuAfcUfcuuGfguuAfcAfusGfsa | 0.05 | 0.14 | 0.48 | 0.0098 |
| D1008 | S1008 | auguaaccaadGadGudAudAcdGasu | AS1008 | aUfgGfaAfuAfcUfcUfuGfgUfuAfcAfusGfsa | 0.07 | 0.11 | 0.33 | 0.010 |
| D1009 | S1009 | UfgGfGfAfuUfuCfAfUfgUfaAfcCfAfAfgsAf | AS1009 | uCfuugGfuUfaCfaugAfaAfuccCfasUfsc | 0.03 | 0.14 | 0.56 | 0.0101 |
| D1010 | S1010 | UfgGfgauUfuCfAfUfgUfaAfcCfaAfgsAf | AS1010 | uCfuUfgGfuUfaCfaugAfaAfUfCfcCfasUfsc | 0.03 | 0.14 | 0.65 | 0.0101 |
| D1011 | S1011 | aUfGfuAfAfccAfAfGfaGfuAfuUfcCfasUf | AS1011 | aUfgGfaAfuAfcUfcuuGfGfuuAfcaUfsgsa | 0.06 | 0.10 | 0.55 | 0.011 |
| D1012 | S1012 | UfgGfgAfuUfuCfAfUfgUfaacCfaAfgsAf | AS1012 | uCfuUfgGfUfUfaCfaugAfaAfuCfcCfasUfsc | 0.04 | 0.13 | 0.54 | 0.0114 |
| D1013 | S1013 | auguaaccaadGadGudAudAcdGasu | AS1013 | aUfgGfaAfuAfcUfcUfugdGudTadCadTsgsa | 0.11 | 0.19 | 0.49 | 0.011 |
| D1014 | S1014 | AfuGfuaaCfcAfAfGfaGfuAfuUfcCfasUf | AS1014 | aUfgGfaAfuAfcUfcuuGfgUfUfAfcAfusGfsa | 0.04 | 0.16 | 0.59 | 0.013 |
| D1015 | S1015 | AfuguAfaccAfaGfdAGfdTAdTudCcdAsu | AS1015 | dAUdGgdAadTAfdCUfcUfuGfgUfuAfcAfusGfsa | 0.07 | 0.15 | 0.51 | 0.013 |
| D1016 | S1016 | auGfuAfaCfcAfAfGfaGfuAfuUfcCfasUf | AS1016 | aUfgGfaAfuAfcUfcuuGfgUfuAfcAfUfsGfsa | 0.05 | 0.14 | 0.64 | 0.013 |
| D1017 | S1017 | UfGfggAfuUfuCfAfUfgUfAfAfcCfaAfgsAf | AS1017 | uCfuUfgGfuuaCfaugAfaAfuCfCfcasUfsc | 0.09 | 0.41 | 0.74 | 0.0133 |
| D1018 | S1018 | AfuguAfaCfcAfAfGfaGfuAfuUfcCfasUf | AS1018 | aUfgGfaAfuAfcUfcuuGfgUfuAfCfAfusGfsa | 0.03 | 0.14 | 0.61 | 0.014 |
| D1019 | S1019 | AfuGfuAfaccAfAfGfaGfuAfuUfcCfasUf | AS1019 | aUfgGfaAfuAfcUfcuuGfGfUfuAfcAfusGfsa | 0.02 | 0.2 | 0.7 | 0.014 |
| D1020 | S1020 | AfsuGfuAfaCfcAfAfGfaGfuAfuucCfasUf | AS1020 | asUfsgGfAfAfuAfcUfcuuGfgUfuAfcAfusGfsa | 0.04 | 0.16 | 0.67 | 0.0156 |
| D1021 | S1021 | aUfguAfAfccAfAfgagUfaUfuCfcasUf | AS1021 | aUfGfgAfaUfaCfUfCfuuGfGfuuAfCfaUfsgsa | 0.11 | 0.24 | 0.64 | 0.016 |
| D1022 | S1022 | dTdGggdAdTuudCdAugdTdAacdCdAagsdA | AS1022 | udCdTugdGdTuadCdAugdAdAaudCdCcasdTsc | 0.08 | 0.27 | 0.64 | 0.0161 |
| D1023 | S1023 | AfsuGfuAfaCfcAfAfGfaGfuAfuucCfasUf | AS1023 | aUfgsGfAfAfuAfcUfcuuGfgUfuAfcAfusGfsa | 0.03 | 0.19 | 0.63 | 0.0163 |
| D1024 | S1024 | UfgGfgAfuUfuCfAfUfguaAfcCfaAfgsAf | AS1024 | uCfuUfgGfuUfAfCfaugAfaAfuCfcCfasUfsc | 0.05 | 0.25 | 0.69 | 0.0164 |
| D1025 | S1025 | UfgGfgAfuUfuCfAfUfgUfAfAfcCfaAfgsAf | AS1025 | uCfuUfgGfuuaCfaugAfaAfuCfcCfasUfsc | 0.04 | 0.18 | 0.75 | 0.0166 |
| D1026 | S1026 | UfgGfgAfuUfuCfAfUfgUfaAfcCfaAfgsAf | AS1026 | uCfuUfgGfuUfaCfaugAfaAfuCfcCfasUfsc | 0.04 | 0.19 | 0.66 | 0.0178 |
| D1027 | S1027 | UfgGfgAfuUfuCfAfUfgUfaAfccaAfgsAf | AS1027 | uCfuUfGfGfuUfaCfaugAfaAfuCfcCfasUfsc | 0.04 | 0.19 | 0.69 | 0.018 |
| D1028 | S1028 | dAdTgudAdAccdAdAgadGdTaudTdCcasdT | AS1028 | adTdGgadAdTacdTdCuudGdGuudAdCausdGsa | 0.15 | 0.29 | 0.72 | 0.018 |
| D1029 | S1029 | AdTGdTAdACdCAdAGdAGdTAdTUdCCdAsU | AS1029 | dAUdGGdAAdTAdCUdCUdTGdGUdTAdCAdTsGsdA | 0.1 | 0.27 | 0.61 | 0.018 |
| D1030 | S1030 | UfgGfGfAfuuuCfAfUfgUfaAfcCfaAfgsAf | AS1030 | uCfuUfgGfuUfaCfaugAfAfAfuccCfasUfsc | 0.04 | 0.21 | 0.64 | 0.0187 |
| D1031 | S1031 | AfuGfuAfAfccAfAfGfAfGfuAfuuccAfsu | AS1031 | AfUfGfGfAfAfuAfCfUfCfUfuGfGfuuAfcAfusGfsa | 0.06 | 0.15 | 0.62 | 0.019 |
| D1032 | S1032 | AfsuGfuAfaCfcAfAfGfaGfuAfuucCfasUf | AS1032 | asUfgGfAfAfuAfcUfcuuGfgUfsuAfcAfusGfsa | 0.09 | 0.34 | 0.78 | 0.021 |
| D1033 | S1033 | UfgGfgAfuUfuCfaUfGfUfaacCfaAfgsAf | AS1033 | uCfuUfgGfUfUfacaUfgAfaAfuCfcCfasUfsc | 0.06 | 0.26 | 0.57 | 0.0212 |
| D1034 | S1034 | AfuGfuAfAfccAfaGfaGfuAfuUfcCfasUf | AS1034 | aUfgGfaAfuAfcUfcUfuGfGfuuAfcAfusGfsa | 0.11 | 0.39 | 0.82 | 0.0216 |
| D1035 | S1035 | UfgGfgAfuuuCfAfUfgUfaAfcCfaAfgsAf | AS1035 | uCfuUfgGfuUfaCfaugAfAfAfuCfcCfasUfsc | 0.04 | 0.16 | 0.56 | 0.0222 |
| D1036 | S1036 | UfgGfGfAfuUfuCfaUfgUfaAfcCfAfAfgsAf | AS1036 | uCfuugGfuUfaCfaUfgAfaAfuccCfasUfsc | 0.06 | 0.31 | 0.78 | 0.0234 |
| D1037 | S1037 | UfgGfGfAfuUfuCfAfUfgUfaAfcCfaAfgsAf | AS1037 | uCfuUfgGfuUfaCfaugAfaAfuccCfasUfsc | 0.03 | 0.14 | 0.62 | 0.0235 |
| D1038 | S1038 | UfGfggAfUfuuCfAfugUfAfacCfAfagsAf | AS1038 | uCfUfugGfUfuaCfAfugAfAfauCfCfcasUfsc | 0.09 | 0.39 | 0.78 | 0.0239 |
| D1039 | S1039 | AfuGfuAfaCfcAfAfGfaGfuAfuucCfasUf | AS1039 | aUfgGfAfAfuAfcUfcuuGfgUfuAfcAfusGfsa | 0.03 | 0.14 | 0.59 | 0.025 |
| D1040 | S1040 | AfuGfuAfaCfcAfAfGfaGfuAfuUfccasUf | AS1040 | aUfGfGfaAfuAfcUfcuuGfgUfuAfcAfusGfsa | 0.03 | 0.13 | 0.56 | 0.025 |
| D1041 | S1041 | AfsuGfuAfaCfcAfAfGfaGfuAfuucCfasUf | AS1041 | asUfgGfAfAfuAfcUfcuuGfgUfuAfcAfusGfsa | 0.06 | 0.27 | 0.79 | 0.0252 |
| D1042 | S1042 | UfgGfgAfuuuCfAfUfgUfAfAfcCfaAfgsAf | AS1042 | uCfuUfgGfuuaCfaugAfAfAfuCfcCfasUfsc | 0.05 | 0.27 | 0.67 | 0.0259 |
| D1043 | S1043 | AfuGfuAfaCfcAfAfGfaGfuauUfcCfasUf | AS1043 | aUfgGfaAfUfAfcUfcuuGfgUfuAfcAfusGfsa | 0.02 | 0.16 | 0.63 | 0.027 |
| D1044 | S1044 | AfsuGfuAfaCfcAfAfGfaGfuAfuucCfasUf | AS1044 | asUfgGfAfAfuAfcUfcuuGfgsUfsuAfcAfusGfsa | 0.06 | 0.30 | 0.81 | 0.0271 |
| D1045 | S1045 | aUfguAfAfccAfAfgaGfGfauUfCfcasUf | AS1045 | aUfGfgaAfUfacUfCfuuGfGfuuAfCfaUfsgsa | 0.12 | 0.29 | 0.8 | 0.028 |
| D1046 | S1046 | AfuGfuAfaCfcAfAfGfaguAfuUfcCfasUf | AS1046 | aUfgGfaAfuAfCfUfcuuGfgUfuAfcAfusGfsa | 0.03 | 0.15 | 0.59 | 0.030 |
| D1047 | S1047 | UfgGfGfAfuUfuCfaUfgUfAfAfcCfaAfgsAf | AS1047 | uCfuUfgGfuuaCfaUfgAfaAfuccCfasUfsc | 0.08 | 0.44 | 0.83 | 0.0324 |
| D1048 | S1048 | AfuGfuAfaCfcAfAfGfaGfuAfuUfcCfasUf | AS1048 | aUfgGfaAfuAfcUfcuuGfgUfuAfcAfusGfsa | 0.07 | 0.23 | 0.67 | 0.036 |
| D1049 | S1049 | AfuGfuAfAfccAfAfGfAfGfuAfuuccAfsu | AS1049 | AfUfGfGfAfAfuAfCfUfCfUfUfGfGfUfuAfCfAfusGfsa | 0.08 | 0.23 | 0.73 | 0.037 |
| D1050 | S1050 | UfgGfgAfuuuCfaUfgUfaAfcCfAfAfgsAf | AS1050 | uCfuugGfuUfaCfaUfgAfAfAfuCfcCfasUfsc | 0.06 | 0.29 | 0.78 | 0.0372 |
| D1051 | S1051 | AfuGfuAfaccaagaguAfuUfcCfasUf | AS1051 | aUfgGfaAfudAcdTcdTudGgdTuAfcAfusgsa | 0.12 | 0.41 | 0.86 | 0.040 |
| D1052 | S1052 | AfuguAfaccAfaGfdAGfdTAdTUdCcdAsu | AS1052 | aUfgGfaAfuAfcUfcUfuGfgUfuAfcAfusGfsa | 0.1 | 0.22 | 0.72 | 0.042 |
| D1053 | S1053 | AfuguAfaccAfaGfdAGfdTAdTUdCcdAsu | AS1053 | dAUdGGdAAfuAfcUfcUfuGfGfUfuAfCfAfusGfsa | 0.09 | 0.31 | 0.69 | 0.044 |
| D1054 | S1054 | AfuGfuAfaCfcAfaGfadGdTAfuUfcdCdAsUf | AS1054 | adTdGGfaAfudAdCUfcUfuGfgUfuAfcAfusGfsa | 0.1 | 0.45 | 0.75 | 0.047 |
| D1055 | S1055 | AfuguAfaccAfaGfaGfdTAdTUdCcdAsu | AS1055 | dAUdGGdAadTAfcUfcUfuGfgUfuAfcAfusGfsa | 0.12 | 0.26 | 0.7 | 0.049 |
| D1056 | S1056 | AuGuAaCcAaGaGuAuUcCasU | AS1056 | aUgGaAuAcUcUuGgUuAcAusGsa | 0.08 | 0.24 | 0.65 | 0.050 |
| D1057 | S1057 | AfuguAfaccAfagaGfuauUfccasUf | AS1057 | aUfGfGfaAfUfAfcUfCfUfuGfGfUfuAfCfAfusGfsa | 0.14 | 0.42 | 0.62 | 0.051 |
| D1058 | S1058 | AfuGfuAfaccaagaguAfuUfcCfasUf | AS1058 | aUfgGfaAfudAcdTcdTudGgdTuAfcAfusGfsa | 0.12 | 0.36 | 0.86 | 0.053 |
| D1059 | S1059 | AfuguAfaccAfaGfdAGfdTAdTUdCcdAsu | AS1059 | dAUdGGdAadTAfdCUfcUfuGfgUfuAfcAfusGfsa | 0.09 | 0.27 | 0.7 | 0.054 |
| D1060 | S1060 | adTgudAdAccdAdAgagdTadTudCcasdT | AS1060 | adTdGgdAadTadCdTdCuudGdGuudAdCadTsgsa | 0.11 | 0.37 | 0.66 | 0.056 |
| D1061 | S1061 | AfuGfuAfaCfcAfaGfdAdGuAfuUfcdCdAsUf | AS1061 | adTdGGfaAfuAfdCdTcUfuGfgUfuAfcAfusGfsa | 0.1 | 0.31 | 0.77 | 0.059 |
| D1062 | S1062 | AfuguAfaccAfaGfdAGfdTAdTudCcdAsu | AS1062 | aUfgGfaAfuAfcUfcUfuGfgUfuAfcAfusGfsa | 0.1 | 0.27 | 0.65 | 0.059 |
| D1063 | S1063 | adTdGuadAdCccdAdGagdTdAuudCdCasu | AS1063 | dAdTggdAdAuadCdTcudTdGgudTdAcadTsdGsa | 0.12 | 0.44 | 0.82 | 0.064 |
| D1064 | S1064 | AfuGfuAfaCfcAfaGfaGfdTdAuUfcdCdAsUf | AS1064 | adTdGGfaAfdTdAcUfcUfuGfgUfuAfcAfusGfsa | 0.12 | 0.32 | 0.83 | 0.064 |
| D1065 | S1065 | AfuguAfaccAfaGfaGfdTAdTudCcdAsu | AS1065 | dAUdGgdAadTAfcUfcUfuGfgUfuAfcAfusGfsa | 0.13 | 0.34 | 0.72 | 0.066 |
| D1066 | S1066 | AfuGfuAfaCfcAfaGfaGfudAdTUfcdCdAsUf | AS1066 | adTdGGfadAdTAfcUfcUfuGfgUfuAfcAfusGfsa | 0.11 | 0.33 | 0.72 | 0.067 |
| D1067 | S1067 | AfuguAfaccAfaGfaGfdTAdTUdCcdAsu | AS1067 | aUfgGfaAfuAfcUfcUfuGfgUfuAfcAfusGfsa | 0.11 | 0.37 | 0.62 | 0.070 |
| D1068 | S1068 | AfuguAfaccAfaGfaGfdTAdTUdCcdAsu | AS1068 | dAUdGGdAAuAfcUfcUfuGfGfUfuAfCfAfusGfsa | 0.16 | 0.33 | 0.64 | 0.072 |
| D1069 | S1069 | aUfGfuaAfCfccAfGfagUfAfuuCfCfasu | AS1069 | AfUfggAfAfuaCfUfcuUfGfguUfAfcaUfsGfsa | 0.14 | 0.43 | 0.73 | 0.074 |
| D1070 | S1070 | AfuGfuAfaCfCfAfaGfaguAfuUfcCfasUf | AS1070 | aUfgGfaAfuAfCfUfcUfuggUfuAfcAfusGfsa | 0.08 | 0.42 | 0.94 | 0.075 |
| D1071 | S1071 | UfgGfgAfuuuCfaUfgUfaAfcCfaAfgsAf | AS1071 | uCfuUfgGfuUfaCfaUfgAfAfAfuCfcCfasUfsc | 0.14 | 0.28 | 0.83 | 0.0797 |
| D1072 | S1072 | AfuGfuAfaCfcAfaGfAfGfuauUfcCfasUf | AS1072 | aUfgGfaAfUfAfcucUfuGfgUfuAfcAfusGfsa | 0.05 | 0.26 | 0.8 | 0.082 |
| D1073 | S1073 | AfuGfuAfaCfcAfaGfadGdTdAdTUfcCfasUf | AS1073 | aUfgGfadAdTdAdCUfcUfuGfgUfuAfcAfusGfsa | 0.12 | 0.41 | 0.73 | 0.083 |
| D1074 | S1074 | AfUfguAfAfccAfAfgaGfUfauUfCfcasUf | AS1074 | aUfGfgaAfUfacUfCfuuGfGfuuAfCfausGfsa | 0.14 | 0.44 | 0.75 | 0.086 |
| D1075 | S1075 | AfuGfuAfaCfcAfaGfaGfuAfuUfcCfasUf | AS1075 | aUfgGfdAdAdTdAcUfcUfuGfgUfuAfcAfusGfsa | 0.1 | 0.41 | 0.72 | 0.088 |
| D1076 | S1076 | AfuGfuAfaCfcAfaGfaGfudAdTdTdCCfasUf | AS1076 | aUfgdGdAdAdTAfcUfcUfuGfgUfuAfcAfusGfsa | 0.15 | 0.45 | 0.86 | 0.088 |
| D1077 | S1077 | AfuGfuAfaCfcAfaGfaGfuAfuUfcCfasu | AS1077 | AfUfgGfaAfuAfcUfcUfuGfgUfuAfcAfusGfsa | 0.08 | 0.46 | 0.95 | 0.092 |
| D1078 | S1078 | AfuGfuAfaCfcAfaGfaGfuAfuUfcCfasUf | AS1078 | dAUdGGdAadTAfcUfcUfuGfgUfuAfcAfusGfsa | 0.09 | 0.32 | 0.76 | 0.093 |
| D1079 | S1079 | AfuguAfaccAfaGfaGfdTadTudCcdAsu | AS1079 | dAudGgdAadTAfcUfcUfuGfgUfuAfcAfusGfsa | 0.14 | 0.38 | 0.76 | 0.095 |
| D1080 | S1080 | AfuGfuAfaCfcAfaGfAfGfuAfuucCfasUf | AS1080 | aUfgGfAfAfuAfcucUfuGfgUfuAfcAfusGfsa | 0.05 | 0.42 | 0.86 | 0.099 |
| D1081 | S1081 | AfuGfuAfaCfcAfaGfaGfuAfuUfdCdCdAsdT | AS1081 | dAdTdGdGaAfuAfcUfcUfuGfgUfuAfcAfusGfsa | 0.17 | 0.47 | 0.9 | 0.105 |
| D1082 | S1082 | AfuGfuAfaccaagaguAfuUfcCfasUf | AS1082 | aUfgGfaAfudACfudCUfudGGfudTAfcAfusgsa | 0.12 | 0.44 | 0.83 | 0.106 |
| D1083 | S1083 | AfuGfuAfaCfcAfaGfaGfuAfuUfcCfasUf | AS1083 | adTdGGfaAfdTdAcUfcUfuGfgUfuAfcAfusGfsa | 0.11 | 0.34 | 0.74 | 0.109 |
| D1084 | S1084 | AfuGfuAfAfCfcAfaGfaGfuauUfcCfasUf | AS1084 | aUfgGfaAfUfAfcUfcUfuGfguuAfcAfusGfsa | 0.1 | 0.45 | 0.93 | 0.117 |
| D1085 | S1085 | AfuGfUfAfaCfcAfaGfaGfuauUfcCfasUf | AS1085 | aUfgGfaAfUfAfcUfcUfuGfgUfuacAfusGfsa | 0.07 | 0.42 | 0.78 | 0.120 |
| D1086 | S1086 | aUfguAfAfccAfAfgaGfuAfuUfcCfasUf | AS1086 | aUfgGfaAfuAfcUfCfuuGfGfuuAfCfaUfsgsa | 0.17 | 0.45 | 0.83 | 0.1197 |
| D1087 | S1087 | AfuGfuAfaCfcAfaGfaGfUfAfuUfcCfasu | AS1087 | AfUfgGfaAfuacUfcUfuGfgUfuAfcAfusGfsa | 0.05 | 0.3 | 0.7 | 0.120 |
| D1088 | S1088 | AfuGfuAfaCfcAfaGfaGfuAfuUfcCfasUf | AS1088 | aUfgGfaAfuAfcUfcUfuGfgUfuAfcAfusgsa | 0.11 | 0.46 | 0.8 | 0.120 |
| D1089 | S1089 | AfuGfuAfaCfcAfaGfaGfUfAfuUfcCfasUf | AS1089 | aUfgGfaAfuacUfcUfuGfgUfuAfcAfusGfsa | 0.14 | 0.49 | 0.85 | 0.122 |
| D1090 | S1090 | AfuGfuAfaCfcAfaGfaGfuauUfcCfasUf | AS1090 | aUfgGfaAfUfAfcUfcUfuGfgUfuAfcAfusGfsa | 0.1 | 0.41 | 0.85 | 0.125 |
| D1091 | S1091 | AfuguAfaccAfaGfaGfdTAdTudCcdAsu | AS1091 | aUfgGfaAfuAfcUfcUfuGfgUfuAfcAfusGfsa | 0.16 | 0.38 | 0.77 | 0.125 |
| D1092 | S1092 | AfuGfuAfaCfcAfaGfAfGfuAfuUfcCfasu | AS1092 | AfUfgGfaAfuAfcucUfuGfgUfuAfcAfusGfsa | 0.05 | 0.31 | 0.93 | 0.126 |
| D1093 | S1093 | auGfuAfaCfcAfaGfAfGfuAfuUfcCfasUf | AS1093 | aUfgGfaAfuAfcucUfuGfgUfuAfcAfUfsGfsa | 0.06 | 0.33 | 0.9 | 0.135 |
| D1094 | S1094 | AfuGfuAfaCfcAfaGfaGfUfAfuUfccasUf | AS1094 | aUfGfGfaAfuacUfcUfuGfgUfuAfcAfusGfsa | 0.07 | 0.39 | 0.85 | 0.142 |
| D1095 | S1095 | AfuGfuAfaCfcAfaGfAfGfuAfuUfcCfasUf | AS1095 | aUfgGfaAfuAfcucUfuGfgUfuAfcAfusGfsa | 0.09 | 0.39 | 0.76 | 0.146 |
| D1096 | S1096 | AfuGfuAfaCfcAfaGfaGfUfAfuucCfasUf | AS1096 | aUfgGfAfAfuacUfcUfuGfgUfuAfcAfusGfsa | 0.06 | 0.38 | 0.85 | 0.147 |
| D1097 | S1097 | AfuGfUfAfaCfcAfaGfaGfuAfuucCfasUf | AS1097 | aUfgGfAfAfuAfcUfcUfuGfgUfuacAfusGfsa | 0.12 | 0.47 | 0.87 | 0.147 |
| D1098 | S1098 | AfuGfuAfaCfcAfaGfaGfuAfUfUfccasUf | AS1098 | aUfGfGfaauAfcUfcUfuGfgUfuAfcAfusGfsa | 0.06 | 0.42 | 0.85 | 0.151 |
| D1099 | S1099 | AfuGfuAfaCfcAfaGfaGfuAfuUfcCfasUf | AS1099 | dAUdGGdAadTAfdCUfcUfuGfgUfuAfcAfusGfsa | 0.16 | 0.41 | 0.85 | 0.152 |
| D1100 | S1100 | AfuguAfaccAfaGfaGfuAfuUfcCfasUf | AS1100 | aUfgGfaAfuAfcUfcUfuGfgUfuAfcAfusGfsa | 0.15 | 0.48 | 0.72 | 0.152 |
| D1101 | S11O1 | AfuGfuAfaCfcAfaGfAfGfuAfuUfccasUf | AS1101 | aUfGfGfaAfuAfcucUfuGfgUfuAfcAfusGfsa | 0.06 | 0.38 | 0.94 | 0.158 |
| D1102 | S1102 | AfuGfuAfaccaagaguAfuUfcCfasUf | AS1102 | aUfgGfaAfuAfdCuCfdTuGfdGuUfacAfusGfsa | 0.21 | 0.45 | 0.89 | 0.162 |
| D1103 | S1103 | AfuGfuaaCfCfAfaGfaGfuAfuUfcCfasUf | AS1103 | aUfgGfaAfuAfcUfcUfuggUfUfAfcAfusGfsa | 0.14 | 0.49 | 0.95 | 0.163 |
| D1104 | S1104 | AfuGfuAfaccAfaGfaGfUfAfuUfcCfasUf | AS1104 | aUfgGfaAfuacUfcUfuGfGfUfuAfcAfusGfsa | 0.06 | 0.36 | 0.92 | 0.163 |
| D1105 | S1105 | AfuGfuAfaCfcAfaGfaGfuAfuucCfasUf | AS1105 | aUfgGfAfAfuAfcUfcUfuGfgUfuAfcAfusGfsa | 0.1 | 0.45 | 0.84 | 0.167 |
| D1106 | S1106 | AfuGfuaaCfcAfaGfAfGfuAfuUfcCfasUf | AS1106 | aUfgGfaAfuAfcucUfuGfgUfUfAfcAfusGfsa | 0.09 | 0.43 | 0.91 | 0.170 |
| D1107 | S1107 | AfuGfuAfaccAfaGfAfGfuAfuUfcCfasUf | AS1107 | aUfgGfaAfuAfcucUfuGfGfUfuAfcAfusGfsa | 0.09 | 0.46 | 1 | 0.171 |
| D1108 | S1108 | AfuguAfaccAfaGfaGfdTadTudCcdAsu | AS1108 | aUfgGfaAfuAfcUfcUfuGfgUfuAfcAfusGfsa | 0.11 | 0.39 | 0.71 | 0.176 |
| D1109 | S1109 | AfuGfUfAfaCfcAfaGfaGfuAfuUfccasUf | AS1109 | aUfGfGfaAfuAfcUfcUfuGfgUfuacAfusGfsa | 0.1 | 0.43 | 0.9 | 0.180 |
| D1110 | S1110 | AfuGfuAfaCfcAfaGfaguAfUfUfcCfasUf | AS1110 | aUfgGfaauAfCfUfcUfuGfgUfuAfcAfusGfsa | 0.06 | 0.42 | 0.88 | 0.182 |
| D1111 | S1111 | AfuGfuAfaCfcAfaGfaGfuAfuUfcCfasUf | AS1111 | dAUdGGdAAuAfcUfcUfuGfGfUfuAfCfAfusGfsa | 0.18 | 0.49 | 0.79 | 0.183 |
| D1112 | S1112 | AfuGfUfAfaccAfaGfaGfuAfuUfcCfasUf | AS1112 | aUfgGfaAfuAfcUfcUfuGfGfUfuacAfusGfsa | 0.14 | 0.48 | 0.85 | 0.195 |
| D1113 | S1113 | AfuGfuAfaCfcAfaGfaguAfuUfcCfasUf | AS1113 | aUfgGfaAfuAfCfUfcUfuGfgUfuAfcAfusGfsa | 0.09 | 0.41 | 0.85 | 0.201 |
| D1114 | S1114 | auGfuAfaCfcAfaGfaGfUfAfuUfcCfasUf | AS1114 | aUfgGfaAfuacUfcUfuGfgUfuAfcAfUfsGfsa | 0.05 | 0.44 | 0.94 | 0.201 |
| D1115 | S1115 | AfuguAfaCfcAfaGfaGfUfAfuUfcCfasUf | AS1115 | aUfgGfaAfuacUfcUfuGfgUfuAfCfAfusGfsa | 0.08 | 0.41 | 0.96 | 0.204 |
| D1116 | S1116 | AfuGfuAfaCfcAfaGfaGfuAfuUfcCfasUf | AS1116 | adTdGGfadAdTAfcUfcUfuGfgUfuAfcAfusGfsa | 0.15 | 0.47 | 0.79 | 0.208 |
| D1117 | S1117 | AfuGfuaaCfcAfaGfaGfUfAfuUfcCfasUf | AS1117 | aUfgGfaAfuacUfcUfuGfgUfUfAfcAfusGfsa | 0.08 | 0.42 | 0.92 | 0.224 |
| D1118 | S1118 | auguaaccaagaguauuccasu | AS1118 | AfUfGfGfAfAfUfAfCfUfCfUfUfGfGfUfUfAfCfAfUfsgsa | 0.19 | 0.5 | 0.87 | 0.303 |
| D1119 | S1119 | AfuGfuAfaCfcAfaGfaGfuAfuUfcCfasUf | AS1119 | aUfgGfaAfuAfcUfcUfuGfgUfuAfcAfusGfsa | 0.14 | 0.55 | 0.89 | |
| D1120 | S1120 | AfuGfuAfaCfcAfaGfaGfuAfuUfcCfasUf | AS1120 | aUfgGfaAfuAfcUfcUfuGfgUfuAfcAfusGfsa | 0.19 | 0.63 | 0.72 | |
| D1121 | S1121 | AfuGfuAfaccAfaGfaGfuAfuUfcCfasUf | AS1121 | aUfgGfaAfuAfcUfcUfuGfGfUfuAfcAfusGfsa | 0.14 | 0.61 | 0.91 | |
| D1122 | S1122 | AfUfGfuAfaCfcAfaGfaGfuAfuUfccasUf | AS1122 | aUfGfGfaAfuAfcUfcUfuGfgUfuAfcausGfsa | 0.14 | 0.54 | 0.95 | |
| D1123 | S1123 | auGfuAfAfCfcAfaGfaGfuAfuUfcCfasUf | AS1123 | aUfgGfaAfuAfcUfcUfuGfguuAfcAfUfsGfsa | 0.13 | 0.61 | 0.97 | |
| D1124 | S1124 | AfuGfuAfaCfcAfaGfaGfuAfUfUfcCfasUf | AS1124 | aUfgGfaauAfcUfcUfuGfgUfuAfcAfusGfsa | 0.14 | 0.56 | 0.94 | |
| D1125 | S1125 | AfuGfuAfaCfcaaGfaGfuAfuUfcCfasUf | AS1125 | aUfgGfaAfuAfcUfcUfUfGfgUfuAfcAfusGfsa | 0.21 | 0.74 | 0.95 | |
| D1126 | S1126 | AfUfGfuAfaCfcAfaGfaGfuAfuucCfasUf | AS1126 | aUfgGfAfAfuAfcUfcUfuGfgUfuAfcausGfsa | 0.2 | 0.69 | 0.91 | |
| D1127 | S1127 | AfuguAfAfCfcAfaGfaGfuAfuUfcCfasUf | AS1127 | aUfgGfaAfuAfcUfcUfuGfguuAfCfAfusGfsa | 0.17 | 0.7 | 0.96 | |
| D1128 | S1128 | AfUfGfuAfaCfcAfaGfaGfuAfuUfcCfasUf | AS1128 | aUfgGfaAfuAfcUfcUfuGfgUfuAfcausGfsa | 0.19 | 0.62 | 0.85 | |
| D1129 | S1129 | AfuGfuAfaCfcAfaGfaGfuAfuUfCfCfasUf | AS1129 | aUfggaAfuAfcUfcUfuGfgUfuAfcAfusGfsa | 0.23 | 0.76 | 0.98 | |
| D1130 | S1130 | AfuGfuAfaCfcAfagaGfuAfuUfcCfasUf | AS1130 | aUfgGfaAfuAfcUfCfUfuGfgUfuAfcAfusGfsa | 0.21 | 0.64 | 0.9 | |
| D1131 | S1131 | AfuGfuAfAfCfcaaGfaGfuAfuUfcCfasUf | AS1131 | aUfgGfaAfuAfcUfcUfUfGfguuAfcAfusGfsa | 0.17 | 0.7 | 1.01 | |
| D1132 | S1132 | AfuGfUfAfaCfcAfaGfaGfuAfuUfcCfasUf | AS1132 | aUfgGfaAfuAfcUfcUfuGfgUfuacAfusGfsa | 0.17 | 0.58 | 0.87 | |
| D1133 | S1133 | AfuGfuAfaCfcAfaGfaGfuAfuUfcCfAfsUf | AS1133 | augGfaAfuAfcUfcUfuGfgUfuAfcAfusGfsa | 0.33 | 0.89 | 1.05 | |
| D1134 | S1134 | AfUfGfuAfaCfcAfaGfaguAfuUfcCfasUf | AS1134 | aUfgGfaAfuAfCfUfcUfuGfgUfuAfcausGfsa | 0.16 | 0.64 | 0.96 | |
| D1135 | S1135 | AfuGfUfAfaCfcAfaGfaguAfuUfcCfasUf | AS1135 | aUfgGfaAfuAfCfUfcUfuGfgUfuacAfusGfsa | 0.12 | 0.53 | 0.96 | |
| D1136 | S1136 | AfuGfuAfAfCfcAfagaGfuAfuUfcCfasUf | AS1136 | aUfgGfaAfuAfcUfCfUfuGfguuAfcAfusGfsa | 0.16 | 0.58 | 0.98 | |
| D1137 | S1137 | AfuGfuAfAfCfcAfaGfaGfuAfuUfcCfasUf | AS1137 | aUfgGfaAfuAfcUfcUfuGfguuAfcAfusGfsa | 0.16 | 0.6 | 0.91 | |
| D1138 | S1138 | AfuGfuAfaCfcAfaGfaGfuAfuUfcCfasUf | AS1138 | aUfgGfaAfuAfcUfcUfuGfgUfuAfcAfusGfsAf | 0.1 | 0.54 | 0.91 | |
| D1139 | S1139 | AfUfGfuAfaCfcAfagaGfuAfuUfcCfasUf | AS1139 | aUfgGfaAfuAfcUfCfUfuGfgUfuAfcausGfsa | 0.24 | 0.68 | 0.98 | |
| D1140 | SI140 | AfuGfUfAfaCfcAfagaGfuAfuUfcCfasUf | AS1140 | aUfgGfaAfuAfcUfCfUfuGfgUfuacAfusGfsa | 0.13 | 0.75 | 0.9 | |
| D1141 | S1141 | AfuGfuAfAfCfcAfaGfaguAfuUfcCfasUf | AS1141 | aUfgGfaAfuAfCfUfcUfuGfguuAfcAfusGfsa | 0.15 | 0.52 | 1.05 | |
| D1142 | S1142 | AfuGfuAfaCfCfAfaGfaGfuAfuUfcCfasUf | AS1142 | aUfgGfaAfuAfcUfcUfuggUfuAfcAfusGfsa | 0.16 | 0.66 | 0.89 | |
| D1143 | S1143 | auGfuAfaCfcAfaGfaGfuAfuUfcCfasUf | AS1143 | aUfgGfaAfuAfcUfcUfuGfgUfuAfcAfUfsGfsa | 0.12 | 0.51 | 0.89 | |
| D1144 | SI144 | AfUfGfuAfaCfcaaGfaGfuAfuUfcCfasUf | AS1144 | aUfgGfaAfuAfcUfcUfUfGfgUfuAfcausGfsa | 0.25 | 0.71 | 0.95 | |
| D1145 | S1145 | AfuGfUfAfaCfcaaGfaGfuAfuUfcCfasUf | AS1145 | aUfgGfaAfuAfcUfcUfUfGfgUfuacAfusGfsa | 0.17 | 0.74 | 0.98 | |
| D1146 | S1146 | AfuguAfaCfcAfaGfaGfuAfuUfcCfasUf | AS1146 | aUfgGfaAfuAfcUfcUfuGfgUfuAfCfAfusGfsa | 0.11 | 0.51 | 0.86 | |
| D1147 | S1147 | AfuGfuAfaCfcAfaGfaGfuAfuUfccasUf | AS1147 | aUfGfGfaAfuAfcUfcUfuGfgUfuAfcAfusGfsa | 0.1 | 0.52 | 0.83 | |
| D1148 | S1148 | AfUfGfuAfaccAfaGfaGfuAfuUfcCfasUf | AS1148 | aUfgGfaAfuAfcUfcUfuGfGfUfuAfcausGfsa | 0.14 | 0.63 | 0.98 | |
| D1149 | S1149 | AfuGfuAfAfCfcAfaGfaGfuAfuucCfasUf | AS1149 | aUfgGfAfAfuAfcUfcUfuGfguuAfcAfusGfsa | 0.13 | 0.58 | 0.88 | |
| D1150 | S1150 | AfuGfuaaCfcAfaGfaGfuAfuUfcCfasUf | AS1150 | aUfgGfaAfuAfcUfcUfuGfgUfUfAfcAfusGfsa | 0.15 | 0.62 | 0.94 | |
| D1151 | S1151 | AfUfGfuaaCfcAfaGfaGfuAfuUfcCfasUf | AS1151 | aUfgGfaAfuAfcUfcUfuGfgUfUfAfcausGfsa | 0.18 | 0.73 | 0.94 | |
| D1152 | S1152 | auGfUfAfaCfcAfaGfaGfuAfuUfcCfasUf | AS1152 | aUfgGfaAfuAfcUfcUfuGfgUfuacAfUfsGfsa | 0.13 | 0.53 | 0.97 | |
| D1153 | S1153 | AfuGfuAfAfCfcAfaGfaGfuAfuUfccasUf | AS1153 | aUfGfGfaAfuAfcUfcUfuGfguuAfcAfusGfsa | 0.13 | 0.53 | 0.98 | |
| D1154 | S1154 | UfgGfgAfuUfuCfaUfgUfaAfcCfaAfgsAf | AS1154 | uCfuUfgGfuUfaCfaUfgAfaAfuCfcCfasUfsc | 0.09 | 0.5 | 0.78 | |
| D1155 | S1155 | UfgGfGfAfuuuCfaUfgUfAfAfcCfaAfgsAf | AS1155 | uCfuUfgGfuuaCfaUfgAfAfAfuccCfasUfsc | 0.13 | 0.62 | 0.89 | |
| D1156 | S1156 | UfgGfgAfuuuCfaUfGfUfaAfcCfaAfgsAf | AS1156 | uCfuUfgGfuUfacaUfgAfAfAfuCfcCfasUfsc | 0.12 | 0.65 | 0.85 | |
| D1157 | S1157 | UfgGfgAfuUfuCfaUfgUfAfAfcCfaAfgsAf | AS1157 | uCfuUfgGfuuaCfaUfgAfaAfuCfcCfasUfsc | 0.11 | 0.54 | 0.85 | |
| D1158 | S1158 | UfgGfgAfuuuCfaUfgUfAfAfcCfaAfgsAf | AS1158 | uCfuUfgGfuuaCfaUfgAfAfAfuCfcCfasUfsc | 0.13 | 0.53 | 0.8 | |
| D1159 | S1159 | UfGfggAfUfuUfcAfuGfuAfAfccAfAfgsAf | AS1159 | uCfuuGfGfuuAfcAfuGaAfauCfCfcasUfsc | 0.59 | 0.89 | 0.81 | |
| D1160 | S1160 | UfGfggAfUfuuCfaUfgUfAfAfcCfaAfgsAf | AS1160 | uCfuUfgGfuuaCfaUfgAfAfauCfCfcasUfsc | 0.16 | 0.72 | 0.9 | |
| D1161 | S1161 | UfgGfgAfuUfucaUfGfUfaAfcCfaAfgsAf | AS1161 | uCfuUfgGfuUfacaUfGfAfaAfuCfcCfasUfsc | 0.27 | 0.69 | 0.86 | |
| D1162 | S1162 | AfuGfuAfaCfcaaGfaGfUfAfuUfcCfasUf | AS1162 | aUfgGfaAfuacUfcUfUfGfgUfuAfcAfusGfsa | 0.12 | 0.6 | 0.95 | |
| D1163 | S1163 | AfuGfuAfaccAfaGfaGfuAfUfUfcCfasUf | AS1163 | aUfgGfaauAfcUfcUfuGfGfUfuAfcAfusGfsa | 0.05 | 0.56 | 1.02 | |
| D1164 | S1164 | AfuGfuAfaCfcAfagaGfUfAfuUfcCfasUf | AS1164 | aUfgGfaAfuacUfCfUfuGfgUfuAfcAfusGfsa | 0.13 | 0.55 | 1 | |
| D1165 | S1165 | AfuGfuAfaCfcaaGfaGfuAfUfUfcCfasUf | AS1165 | aUfgGfaauAfcUfcUfUfGfgUfuAfcAfusGfsa | 0.09 | 0.6 | 0.97 | |
| D1166 | S1166 | AfuguAfaCfCfAfaGfaGfuAfuUfcCfasUf | AS1166 | aUfgGfaAfuAfcUfcUfuggUfuAfCfAfusGfsa | 0.15 | 0.59 | 0.91 | |
| D1167 | S1167 | AfuGfuAfaCfcAfagaGfuAfUfUfcCfasUf | AS1167 | aUfgGfaauAfcUfCfUfuGfgUfuAfcAfusGfsa | 0.11 | 0.59 | 1 | |
| D1168 | S1168 | AfuGfuAfaCfCfAfagaGfuAfuUfcCfasUf | AS1168 | aUfgGfaAfuAfcUfCfUfuggUfuAfcAfusGfsa | 0.13 | 0.57 | 0.94 | |
| D1169 | S1169 | auGfuAfaCfcAfaGfaGfuAfUfUfcCfasUf | AS1169 | aUfgGfaauAfcUfcUfuGfgUfuAfcAfUfsGfsa | 0.08 | 0.5 | 0.9 | |
| D1170 | S1170 | AfuguAfaCfcAfaGfaGfuAfUfUfcCfasUf | AS1170 | aUfgGfaauAfcUfcUfuGfgUfuAfCfAfusGfsa | 0.06 | 0.53 | 0.91 | |
| D1171 | S1171 | auGfuAfaCfcAfaGfaGfuAfuUfCfCfasUf | AS1171 | aUfggaAfuAfcUfcUfuGfgUfuAfcAfUfsGfsa | 0.07 | 0.56 | 0.89 | |
| D1172 | S1172 | AfuGfuAfaCfCfAfaGfaGfuAfuucCfasUf | AS1172 | aUfgGfAfAfuAfcUfcUfuggUfuAfcAfusGfsa | 0.13 | 0.59 | 0.98 | |
| D1173 | S1173 | AfuGfuAfaCfcaaGfAfGfuAfuUfcCfasUf | AS1173 | aUfgGfaAfuAfcucUfUfGfgUfuAfcAfusGfsa | 0.2 | 0.65 | 1.03 | |
| D1174 | S1174 | AfuGfuaaCfcAfaGfaGfuAfUfUfcCfasUf | AS1174 | aUfgGfaauAfcUfcUfuGfgUfUfAfcAfusGfsa | 0.07 | 0.51 | 0.95 | |
| D1175 | S1175 | AfuguAfaCfcAfaGfaGfuAfuUfCfCfasUf | AS1175 | aUfggaAfuAfcUfcUfuGfgUfuAfCfAfusGfsa | 0.2 | 0.53 | 0.76 | |
| D1176 | S1176 | auGfuAfaCfcAfaGfaGfuAfuUfcCfAfsUf | AS1176 | augGfaAfuAfcUfcUfuGfgUfuAfcAfusGfsa | 0.74 | 0.98 | 0.81 | |
| D1177 | S1177 | AfuGfuAfaCfcAfaGfaGfuAfuucCfAfsUf | AS1177 | augGfAfAfuAfcUfcUfuGfgUfuAfcAfusGfsa | 0.43 | 0.64 | 0.88 | |
| D1178 | S1178 | auguaaccAfaGfaGfuAfuUfcCfasUf | AS1178 | aUfgGfaAfuAfcUfcUfuGfgUfuAfcAfusGfsa | 0.17 | 0.49 | 0.81 | |
| D1179 | S1179 | AfuGfuaaCfcAfaGfaGfuAfuUfCfCfasUf | AS1179 | aUfggaAfuAfcUfcUfuGfgUfUfAfcAfusGfsa | 0.22 | 0.65 | 0.73 | |
| D1180 | S1180 | AfuguAfaCfcAfaGfaGfuAfuUfcCfAfsUf | AS1180 | augGfaAfuAfcUfcUfuGfgUfuAfcAfUfsGfsa | 0.6 | 1.09 | 0.8 | |
| D1181 | S1181 | auGfuAfaCfcAfaGfaGfuAfuUfccasu | AS1181 | aUfgGfaAfuAfcUfcUfuGfgUfuAfcAfusGfsa | 0.3 | 0.78 | 0.78 | |
| D1182 | S1182 | auguaaccaaGfaGfuAfuUfcCfasUf | AS1182 | aUfgGfaAfuAfcUfcUfuGfgUfuAfcAfusGfsa | 0.35 | 0.73 | 0.84 | |
| D1183 | S1183 | AfuGfuAfaccAfaGfaGfuAfuUfCfCfasUf | AS1183 | aUfggaAfuAfcUfcUfuGfGfUfuAfcAfusGfsa | 0.19 | 0.6 | 0.94 | |
| D1184 | S1184 | AfuGfuaaCfcAfaGfaGfuAfuUfcCfAfsUf | AS1184 | augGfaAfuAfcUfcUfuGfgUfuAfCfAfusGfsa | 0.61 | 1.08 | 0.8 | |
| D1185 | S1185 | auGfuAfaCfcAfaGfaGfuAfuuccasu | AS1185 | aUfgGfaAfuAfcUfcUfuGfgUfuAfcAfusGfsa | 0.16 | 0.52 | 0.72 | |
| D1186 | S1186 | auguaaccaagaGfuAfuUfcCfasUf | AS1186 | aUfgGfaAfuAfcUfcUfuGfgUfuAfcAfusGfsa | 0.2 | 0.53 | 0.74 | |
| D1187 | S1187 | AfuGfuAfaCfcaaGfaGfuAfuUfCfCfasUf | AS1187 | aUfggaAfuAfcUfcUfUfGfgUfuAfcAfusGfsa | 0.34 | 0.66 | 0.85 | |
| D1188 | S1188 | AfuGfuAfaccAfaGfaGfuAfuUfcCfAfsUf | AS1188 | augGfaAfuAfcUfcUfuGfgUfUfAfcAfusGfsa | 0.61 | 0.98 | 1.02 | |
| D1189 | S1189 | AfuGfuAfaCfcAfaGfaGfuAfuuccasu | AS1189 | aUfgGfaAfuAfcUfcUfuGfgUfuAfcAfusGfsa | 0.3 | 0.73 | 0.85 | |
| D1190 | S1190 | auguaaccaagaguauuccasu | AS1190 | aUfgGfaAfuAfcUfcUfuGfgUfuAfcAfusGfsa | 0.28 | 0.69 | 0.78 | |
| D1191 | S1191 | AfuGfuAfaCfcAfaGfaGfuAfuUfcCfasUf | AS1191 | aUfgGfaAfuAfcUfcUfugdGudTadCadTsgsa | 0.33 | 0.88 | 0.64 | |
| D1192 | S1192 | AfuGfuAfaCfcAfagaGfuAfuUfCfCfasUf | AS1192 | aUfggaAfuAfcUfCfUfuGfgUfuAfcAfusGfsa | 0.31 | 0.64 | 0.83 | |
| D1193 | S1193 | AfuGfuAfaCfcaaGfaGfuAfuUfcCfAfsUf | AS1193 | augGfaAfuAfcUfcUfuGfGfUfuAfcAfusGfsa | 0.64 | 0.82 | 0.92 | |
| D1194 | S1194 | AfuGfuAfaCfcAfaGfaGfuauuccasu | AS1194 | aUfgGfaAfuAfcUfcUfuGfgUfuAfcAfusGfsa | 0.21 | 0.62 | 0.77 | |
| D1195 | S1195 | AfuGfuAfaCfcAfaGfaGfuAfuUfcCfasUf | AS1195 | aUfgGfaAfuAfcUfcUfuGfGfUfuAfCfAfusGfsa | 0.17 | 0.7 | 0.95 | |
| D1196 | S1196 | AfuGfuAfaCfcAfaGfaguAfuUfCfCfasUf | AS1196 | aUfggaAfuAfCfUfcUfuGfgUfuAfcAfusGfsa | 0.19 | 0.71 | 0.65 | |
| D1197 | S1197 | AfuGfuAfaCfcAfagaGfuAfuUfcCfAfsUf | AS1197 | augGfaAfuAfcUfcUfUfGfgUfuAfcAfusGfsa | 0.64 | 0.82 | 0.93 | |
| D1198 | S1198 | auguAfaCfcAfaGfaGfuAfuUfccasu | AS1198 | aUfgGfaAfuAfcUfcUfuGfgUfuAfcAfusGfsa | 0.19 | 0.65 | 0.72 | |
| D1199 | S1199 | AfuGfuAfaCfcAfaGfaGfuauUfCfCfasUf | AS1199 | aUfggaAfUfAfcUfcUfuGfgUfuAfcAfusGfsa | 0.15 | 0.52 | 0.64 | |
| D1200 | S1200 | AfuGfuAfaCfcAfaGfaguAfuUfcCfAfsUf | AS1200 | augGfaAfuAfcUfCfUfuGfgUfuAfcAfusGfsa | 0.48 | 0.74 | 0.92 | |
| D1201 | S1201 | auguAfaCfcAfaGfaGfuAfuUfcCfasu | AS1201 | aUfgGfaAfuAfcUfcUfuGfgUfuAfcAfusGfsa | 0.17 | 0.71 | 0.77 | |
| D1202 | S1202 | AfuGfuAfaCfcAfaGfaGfuauUfcCfAfsUf | AS1202 | augGfaAfuAfCfUfcUfuGfgUfuAfcAfusGfsa | 0.43 | 0.69 | 0.85 | |
| D1203 | S1203 | auguaaCfcAfaGfaGfuAfuUfcCfasUf | AS1203 | aUfgGfaAfuAfcUfcUfuGfgUfuAfcAfusGfsa | 0.14 | 0.61 | 0.76 | |
| D1204 | S1204 | AfuGfuAfaCfcAfaGfaGfuAfuUfcCfasUf | AS1204 | adTdGGfaAfudAdCUfcUfuGfgUfuAfcAfusGfsa | 0.16 | 0.56 | 0.89 | |
| D1205 | S1205 | AfuGfuAfaCfcAfaGfaGfdTdAdTdTcCfasUf | AS1205 | aUfgGfdAdAdTdAcUfcUfuGfgUfuAfcAfusGfsa | 0.13 | 0.57 | 0.9 | |
| D1206 | S1206 | AfuGfuAfaCfcAfaGfaGfuAfuUfcCfasUf | AS1206 | adTdGdGdAAfuAfcUfcUfuGfgUfuAfcAfusGfsa | 0.29 | 0.73 | 0.89 | |
| D1207 | S1207 | AfuGfuAfaCfcAfaGfaGfuAfuUfcCfasUf | AS1207 | adTdGGfaAfuAfdCdTcUfuGfgUfuAfcAfusGfsa | 0.16 | 0.56 | 0.78 | |
| D1208 | S1208 | AfuGfuAfaCfcAfaGfaGfuAfuUfcCfasUf | AS1208 | aUfdGdGdAdAuAfcUfcUfuGfgUfuAfcAfusGfsa | 0.22 | 0.67 | 0.89 | |
| D1209 | S1209 | AfuguAfaccAfaGfaGfuAfuUfcCfasUf | AS1209 | aUfgGfaAfuAfcUfcUfuGfGfUfuAfCfAfusGfsa | 0.14 | 0.55 | 0.78 | |
| D1210 | S1210 | AfuGfuAfaCfcAfaGfaGfuAfuUfcCfasUf | AS1210 | aUfgdGdAdAdTAfcUfcUfuGfgUfuAfcAfusGfsa | 0.14 | 0.5 | 0.84 | |
| D1211 | S1211 | AfuGfuAfaCfcAfaGfaGfuAfuUfcCfasUf | AS1211 | aUfgGfadAdTdAdCUfcUfuGfgUfuAfcAfusGfsa | 0.14 | 0.59 | 0.72 | |
| D1212 | S1212 | auguaaccaaGfaGfuAfuUfcCfasUf | AS1212 | aUfgGfaAfuAfcUfcUfugdGudTadCadTsgsa | 0.21 | 0.74 | 0.77 | |
| D1213 | S1213 | AfuGfuAfaCfcAfaGfaGfuAfudTdCdCdAsUf | AS1213 | adTdGdGdAAfuAfcUfcUfuGfgUfuAfcAfusGfsa | 0.15 | 0.53 | 0.91 | |
| D1214 | S1214 | aUfgUfaAfcCfaAfgAfgUfaUfuCfcAfsu | AS1214 | aUfgGfaAfuAfcUfcUfuGfgUfuAfcAfusGfsa | 0.12 | 0.71 | 0.87 | |
| D1215 | S1215 | AfuGfuAfaCfcAfaGfaGfuAfdTdTdCdCasUf | AS1215 | aUfdGdGdAdAuAfcUfcUfuGfgUfuAfcAfusGfsa | 0.18 | 0.67 | 0.97 | |
| D1216 | S1216 | AfuGfuAfaccaagaguAfuUfcCfasUf | AS1216 | aUfgGfaAfuacucuuggUfuAfcAfusgsa | 0.36 | 0.87 | 1.07 | |
| D1217 | S1217 | AfuGfuAfaccaagaguAfuUfcCfasUf | AS1217 | aUfgGfaAfuAfCfUfCfUfuGfGfuuAfcAfusgsa | 0.37 | 0.73 | 1.03 | |
| D1218 | S1218 | AfUfguAfAfccAfAfgaGfUfauUfCfcasUf | AS1218 | aUfGfgaAfUfacUfCfuuGfGfuuAfCfausGfsa | 0.23 | 0.42 | 0.84 | |
| D1219 | S1219 | AfuGfuAfaccaagaguAfuUfcCfasUf | AS1219 | aUfgGfaAfuaCfUfcUfUfgGfuuAfcAfusgsa | 0.43 | 0.71 | 1.03 | |
| D1220 | S1220 | AfuGfuAfaccaagaguAfuUfcCfasUf | AS1220 | aUfgGfaAfuAfcUfCfUfuGfGfuuAfcAfusgsa | 0.37 | 0.63 | 0.99 | |
| D1221 | S1221 | AfuGfuAfaccaagaguAfuUfcCfasUf | AS1221 | aUfgGfaAfuAfcUfCfUfuGfGfuUfacAfusgsa | 0.29 | 0.84 | 0.88 | |
| D1222 | S1222 | AfuGfuAfaccaagaguAfuUfcCfasUf | AS1222 | aUfgGfaAfuaCfuCfuUfgGfuuAfcAfusgsa | 0.31 | 0.8 | 0.99 | |
| D1223 | S1223 | auGfuAfAfccAfaGfagUfaUfUfcCfasUf | AS1223 | aUfgGfaaUfaCfUfcUfuGfGfuuAfcAfAfsgsa | 0.09 | 0.52 | 0.82 | |
| D1224 | S1224 | AfuGfuAfaccaagaguAfuUfcCfasUf | AS1224 | aUfgGfaAfuadCudCudTgdGuuAfcAfusgsa | 0.22 | 0.79 | 1 | |
| D1225 | S1225 | auGfuaAfccAfagAfguAfuuCfcasUf | AS1225 | aUfGfgAfAfuAfCfuCfUfuGfGfuUfAfcAfUfsGfsa | 0.31 | 0.76 | 0.84 | |
| D1226 | S1226 | AfuGfuAfaccaagaguAfuUfcCfasUf | AS1226 | aUfgGfaAfuadCUfcdTUfgdGuuAfcAfusgsa | 0.26 | 0.64 | 0.87 | |
| D1227 | S1227 | augUfaacCfaagAfguaUfuccAfsu | AS1227 | aUfgGfAfaUfAfCfuCfUfUfgGfUfUfaCfAfUfsGfsa | 0.33 | 0.79 | 0.81 | |
| D1228 | S1228 | AfuGfuAfaCfcAfaGfaGfuAfuUfcCfasUf | AS1228 | aUfgGfaAfuAfcUfcUfuGfgUfuAfcAfusGfsa | 0.464 | 0.932 | 0.978 | |
| D1229 | S1229 | AfuGfuAfaCfcAfaGfaGfuAfuUfcCfasUf | AS1229 | aUfgGfaAfuAfcUfcUfuGfgUfuAfcAfusGfsa | 0.453 | 1.047 | 1.178 | |
| D1230 | S1230 | AfuGfuAfaCfcAfaGfaGfuAfuUfcCfasUf | AS1230 | aUfgGfaAfuAfcUfcUfuGfgUfuAfcAfusGfsa | 0.831 | 0.967 | 1.151 | |
| D1231 | S1231 | auGfuAfAfCfcAfaGfaGfuAfuUfcCfasu | AS1231 | AfUfgGfaAfuAfcUfcUfuGfguuAfcAfUfsGfsa | 0.09 | 0.5 | 1.07 | |
| D1232 | S1232 | AfuGfuAfaCfCfAfaGfaGfuAfuUfcCfasu | AS1232 | AfUfgGfaAfuAfcUfcUfuggUfuAfcAfusGfsa | 0.11 | 0.54 | 1.1 | |
| D1233 | S1233 | AfuGfuAfaCfcAfaGfaGfuAfuUfCfCfasu | AS1233 | AfUfggaAfuAfcUfcUfuGfgUfuAfcAfusGfsa | 0.19 | 0.61 | 0.74 | |
| D1234 | S1234 | aUfgUfaAfcCfaAfgAfgUfaUfuCfcAfsu | AS1234 | AfuGfgAfaUfaCfuCfuUfgGfuUfaCfaUfsgsAf | 0.22 | 0.61 | 0.98 | |
| D1235 | S1235 | aUfgUfaAfcCfaAfgAfgUfaUfuCfcAfsu | AS1235 | AfuGfgAfaUfaCfuCfuUfgGfuUfaCfaUfsgsAf | 0.27 | 0.69 | 0.92 | |
| D1236 | S1236 | AfuGfuAfaCfcAfaGfaGfuAfuUfcCfasUf | AS1236 | AfuGfgAfaUfaCfuCfuUfgGfuUfaCfaUfsgsAf | 0.54 | 1.08 | 0.8 | |
| D1237 | S1237 | augUfaAfccaAfgAfguaUfuCfcasu | AS1237 | AfUfGfgAfaUfAfCfuCfuUfGfGfuUfaCfAfUfsgsa | 0.29 | 0.61 | 0.79 | |
| D1238 | S1238 | AfugUfaAfccaAfgAfguaUfuCfcasu | AS1238 | AfUfGfgAfaUfAfCfuCfuUfGfGfuUfaCfAfusgsa | 0.31 | 0.6 | 0.88 | |
| D1239 | S1239 | AfuGfuAfaCfcAfaGfaGfuAfuUfcCfasUf | AS1239 | dAUdGGdAauAfcUfcUfuGfgUfuAfcAfusGfsa | 0.2 | 0.67 | 0.85 | |
| D1240 | S1240 | AfuGfuAfaCfcAfaGfaGfuAfuUfcCfasUf | AS1240 | dAUdGgdAauAfcUfcUfuGfgUfuAfcAfusGfsa | 0.23 | 0.58 | 0.68 | |
| D1241 | S1241 | AfuGfuAfaCfcAfaGfaGfuAfuUfcCfasUf | AS1241 | dAudGgdAauAfcUfcUfuGfgUfuAfcAfusGfsa | 0.25 | 0.65 | 0.78 | |
| D1242 | S1242 | AfuGfuAfaCfcAfaGfaGfuAfuUfcCfasUf | AS1242 | dAUdGgdAadTAfcUfcUfuGfgUfuAfcAfusGfsa | 0.18 | 0.64 | 0.84 | |
| D1243 | S1243 | AfuGfuAfaCfcAfaGfaGfuAfuUfcCfasUf | AS1243 | dAUdGGdAAfuAfcUfcUfuGfGfUfuAfCfAfusGfsa | 0.19 | 0.72 | 0.87 | |
| D1244 | S1244 | AfuGfuAfaCfcAfaGfaGfuAfuUfcCfasUf | AS1244 | dAUdGgdAadTAfdCUfcUfuGfgUfuAfcAfusGfsa | 0.16 | 0.55 | 0.8 | |
| D1245 | S1245 | AfuGfuAfaCfcAfaGfaGfuAfuUfcCfasUf | AS1245 | dAUdGGdAAuAfcUfcUfuGfgUfuAfcAfusGfsa | 0.22 | 0.51 | 0.9 | |
| D1246 | S1246 | AfuGfuAfaCfcAfaGfaGfuAfuUfcCfasUf | AS1246 | dAudGgdAadTAfcUfcUfuGfgUfuAfcAfusGfsa | 0.27 | 0.78 | 0.66 | |
| D1247 | S1247 | AfuGfuAfaCfcAfaGfaGfuAfuUfcCfasUf | AS1247 | dAdTdGdGaAfuAfcUfcUfuGfgUfuAfcAfusGfsa | 0.16 | 0.57 | 0.97 | |
| D1248 | S1248 | AfacaAfuguUfcUfuGfdCUdCudAudAsa | AS1248 | dTUdAudAgdAGfcAfaGfaAfcAfcUfgUfusUfsu | 0.06 | 0.09 | 0.36 | 0.0047 |
| D1249 | S1249 | AfaCfaGfuGfuUfcUfuGfCfUfcUfaUfasa | AS1249 | UfUfaUfaGfagcAfaGfaAfcAfcUfgUfusUfsu | 0.06 | 0.10 | 0.47 | 0.005 |
| D1250 | S1250 | AfaCfaGfuGfuUfcUfugcUfcUfAfUfasAf | AS1250 | uUfauaGfaGfCfAfaGfaAfcAfcUfgUfusUfsu | 0.07 | 0.14 | 0.55 | 0.005 |
| D1251 | S1251 | AfaCfaGfuGfuUfcUfuGfcucUfAfUfasAf | AS1251 | uUfauaGfAfGfcAfaGfaAfcAfcUfgUfusUfsu | 0.07 | 0.14 | 0.49 | 0.006 |
| D1252 | S1252 | cAGuGuucuuGcucuAuAAdTdT | AS1252 | UuAuAGAGcAAGAAcACUGdTdT | | | | 0.006 |
| D1253 | S1253 | AfaCfaGfuGfuUfcUfugcUfCfUfaUfasAf | AS1253 | uUfaUfagaGfCfAfaGfaAfcAfcUfgUfusUfsu | 0.05 | 0.12 | 0.43 | 0.006 |
| D1254 | S1254 | AfaCfaGfuGfuUfCfUfuGfcUfcUfaUfasa | AS1254 | UfUfaUfaGfaGfcAfagaAfcAfcUfgUfusUfsu | 0.06 | 0.13 | 0.39 | 0.006 |
| D1255 | S1255 | AfaCfaGfuGfuUfcUfuGfcUfCfUfaUfasa | AS1255 | UfUfaUfagaGfcAfaGfaAfcAfcUfgUfusUfsu | 0.08 | 0.17 | 0.48 | 0.007 |
| D1256 | S1256 | AfaCfaGfuGfuUfcUfUfGfcUfcUfaUfasa | AS1256 | UfUfaUfaGfaGfcaaGfaAfcAfcUfgUfusUfsu | 0.08 | 0.14 | 0.40 | 0.007 |
| D1257 | S1257 | AfaCfaGfuGfuUfcUfuGfcUfCfUfaUfasAf | AS1257 | uUfaUfagaGfcAfaGfaAfcAfcUfgUfusUfsUf | 0.07 | 0.12 | 0.40 | 0.007 |
| D1258 | S1258 | AfaCfaguGfuUfCfUfuGfcUfcUfaUfasAf | AS1258 | uUfaUfaGfaGfcAfagaAfcAfCfUfgUfusUfsu | 0.08 | 0.13 | 0.41 | 0.007 |
| D1259 | S1259 | AfaCfAfGfuGfuUfcUfuGfcucUfaUfasAf | AS1259 | uUfaUfaGfAfGfcAfaGfaAfcAfcugUfusUfsu | 0.05 | 0.11 | 0.35 | 0.008 |
| D1260 | S1260 | AfacaGfuGfuUfCfUfuGfcUfcUfaUfasAf | AS1260 | uUfaUfaGfaGfcAfagaAfcAfcUfGfUfusUfsu | 0.06 | 0.12 | 0.40 | 0.008 |
| D1261 | S1261 | AfacaGfuGfuUfcUfuGfcUfCfUfaUfasAf | AS1261 | uUfaUfagaGfcAfaGfaAfcAfcUfGfUfusUfsu | 0.06 | 0.13 | 0.42 | 0.008 |
| D1262 | S1262 | AfaCfaGfuGfuUfcUfuGfcucUfaUfasAf | AS1262 | uUfaUfaGfAfGfcAfaGfaAfcAfcUfgUfusUfsu | 0.06 | 0.13 | 0.37 | 0.008 |
| D1263 | S1263 | cAGuGuucuuGcucuAuAAdTdT | AS1263 | UuAuAGAGcAAGAAcACUGdTdT | | | | 0.008 |
| D1264 | S1264 | AfaCfaGfuGfuUfcUfuGfCfUfcUfauasAf | AS1264 | uUfAfUfaGfagcAfaGfaAfcAfcUfgUfusUfsu | 0.07 | 0.12 | 0.50 | 0.008 |
| D1265 | S1265 | AfaCfaGfuguUfCfUfuGfcUfcUfaUfasAf | AS1265 | uUfaUfaGfaGfcAfagaAfCfAfcUfgUfusUfsu | 0.12 | 0.13 | 0.48 | 0.009 |
| D1266 | S1266 | AfacaGfuGfuUfcUfuGfcUfcUfAfUfasAf | AS1266 | uUfauaGfaGfcAfaGfaAfcAfcUfGfUfusUfsu | 0.07 | 0.15 | 0.51 | 0.009 |
| D1267 | S1267 | AfacaAfuguUfcUfuGfdCudCudAudAsa | AS1267 | dTudAudAgdAGfcAfaGfaAfcAfcAfgUfusUfsu | 0.06 | 0.14 | 0.48 | 0.0088 |
| D1268 | S1268 | AfaCfaGfuGfuUfCfUfuGfcucUfaUfasAf | AS1268 | uUfaUfaGfAfGfcAfagaAfcAfcUfgUfusUfsu | 0.05 | 0.09 | 0.35 | 0.009 |
| D1269 | S1269 | cAGuGuucuuGcucuAuAAdTdT | AS1269 | UuAuAGAGcAAGAAcACUGdTdT | | | | 0.009 |
| D1270 | S1270 | aaCfaGfuGfuUfcUfuGfcUfCfUfaUfasAf | AS1270 | uUfaUfagaGfcAfaGfaAfcAfcUfgUfUfsUfsu | 0.07 | 0.14 | 0.49 | 0.009 |
| D1271 | S1271 | AfaCfaGfUfGfuUfcUfuGfcucUfaUfasAf | AS1271 | uUfaUfaGfAfGfcAfaGfaAfcacUfgUfusUfsu | 0.06 | 0.10 | 0.36 | 0.009 |
| D1272 | S1272 | cAGuGuucuuGcucuAuAAdTdT | AS1272 | UuAuAGAGcAAGAAcACUGdTdT | | | | 0.009 |
| D1273 | S1273 | AfaCfaGfUfGfuUfcUfuGfcUfcUfaUfasAf | AS1273 | uUfaUfaGfaGfcAfaGfaAfcacUfgUfusUfsUf | 0.06 | 0.13 | 0.51 | 0.009 |
| D1274 | S1274 | AfaCfaGfuGfuUfCfUfuGfcUfcuaUfasAf | AS1274 | uUfaUfAfGfaGfcAfagaAfcAfcUfgUfusUfsu | 0.06 | 0.12 | 0.46 | 0.010 |
| D1275 | S1275 | cAGuGuucuuGcucuAuAAdTdT | AS1275 | UuAuAGAGcAAGAAcACUGdTdT | | | | 0.010 |
| D1276 | S1276 | AfaCfaGfuGfuUfCfUfuGfcUfcUfauasAf | AS1276 | uUfAfUfaGfaGfcAfagaAfcAfcUfgUfusUfsu | 0.06 | 0.14 | 0.47 | 0.010 |
| D1277 | S1277 | AfaCfaguGfuUfcUfuGfcUfCfUfaUfasAf | AS1277 | uUfaUfagaGfcAfaGfaAfcAfCfUfgUfusUfsu | 0.07 | 0.15 | 0.50 | 0.010 |
| D1278 | S1278 | AfaCfaGfuGfuUfCfUfugcUfcUfaUfasAf | AS1278 | uUfaUfaGfaGfCfAfagaAfcAfcUfgUfusUfsu | 0.06 | 0.13 | 0.43 | 0.010 |
| D1279 | S1279 | cAGuGuucuuGcucuAuAAdTdT | AS1279 | UuAuAGAGcAAGAAcACUGdTdT | | | | 0.010 |
| D1280 | S1280 | AfaCfaGfuGfuUfcUfuGfcUfcUfaUfasa | AS1280 | UfUfaUfaGfaGfcAfaGfaAfcAfcUfgUfususu | 0.06 | 0.14 | 0.45 | 0.010 |
| D1281 | S1281 | AfaCfAfGfuGfuUfcUfuGfcUfcUfaUfasa | AS1281 | UfUfaUfaGfaGfcAfaGfaAfcAfcugUfusUfsu | 0.07 | 0.18 | 0.46 | 0.011 |
| D1282 | S1282 | AfaCfaGfuGfuUfcUfuGfcUfcUfaUfasAf | AS1282 | uUfaUfaGfaGfcAfaGfaAfcAfcUfgUfusUfsu | 0.07 | 0.15 | 0.55 | 0.011 |
| D1283 | S1283 | AfaCfaGfuGfuUfcUfuGfcucUfaUfasAf | AS1283 | uUfaUfaGfAfGfcAfaGfaAfcAfcUfgUfususu | 0.07 | 0.12 | 0.45 | 0.011 |
| D1284 | S1284 | AfacaGfuGfuUfcUfuGfcUfcUfaUfasAf | AS1284 | uUfaUfaGfaGfcAfaGfaAfcAfcUfGfUfusUfsu | 0.06 | 0.13 | 0.48 | 0.011 |
| D1285 | S1285 | AfAfCfaGfuGfuUfcUfuGfcucUfaUfasAf | AS1285 | uUfaUfaGfAfGfcAfaGfaAfcAfcUfguusUfsu | 0.06 | 0.11 | 0.40 | 0.011 |
| D1286 | S1286 | AfaCfAfGfuGfuUfcUfuGfcUfcUfauasAf | AS1286 | uUfAfUfaGfaGfcAfaGfaAfcAfcugUfusUfsu | 0.06 | 0.16 | 0.47 | 0.011 |
| D1287 | S1287 | AfaCfaGfuGfuUfcUfugcUfcUfaUfasAf | AS1287 | uUfaUfaGfaGfCfAfaGfaAfcAfcUfgUfususu | 0.07 | 0.19 | 0.46 | 0.012 |
| D1288 | S1288 | AfaCfaGfuGfuUfcUfugcUfcUfaUfasAf | AS1288 | uUfaUfaGfaGfCfAfaGfaAfcAfcUfgUfusUfsu | 0.06 | 0.17 | 0.46 | 0.012 |
| D1289 | S1289 | AfaCfaGfuGfuUfcUfUfGfcucUfaUfasAf | AS1289 | uUfaUfaGfAfGfcaaGfaAfcAfcUfgUfusUfsu | 0.05 | 0.09 | 0.31 | 0.012 |
| D1290 | S1290 | AfAfCfaGfuGfuUfcUfuGfcUfcUfaUfasa | AS1290 | UfUfaUfaGfaGfcAfaGfaAfcAfcUfguusUfsu | 0.06 | 0.16 | 0.49 | 0.013 |
| D1291 | S1291 | AfaCfaGfuGfuUfCfUfuGfcUfcUfaUfasAf | AS1291 | uUfaUfaGfaGfcAfagaAfcAfcUfgUfusUfsUf | 0.06 | 0.11 | 0.32 | 0.013 |
| D1292 | S1292 | AfaCfAfGfuGfuUfcUfugcUfcUfaUfasAf | AS1292 | uUfaUfaGfaGfCfAfaGfaAfcAfcugUfusUfsu | 0.06 | 0.14 | 0.44 | 0.013 |
| D1293 | S1293 | AfaCfaGfUfGfuUfcUfuGfcUfcUfaUfasa | AS1293 | UfUfaUfaGfaGfcAfaGfaAfcacUfgUfusUfsu | 0.07 | 0.16 | 0.39 | 0.013 |
| D1294 | S1294 | AfaCfAfGfuGfuUfcUfuGfcUfcuaUfasAf | AS1294 | uUfaUfAfGfaGfcAfaGfaAfcAfcugUfusUfsu | 0.07 | 0.18 | 0.41 | 0.014 |
| D1295 | S1295 | AfaCfaGfUfGfuUfcUfuGfcUfcuaUfasAf | AS1295 | uUfaUfAfGfaGfcAfaGfaAfcacUfgUfusUfsu | 0.07 | 0.18 | 0.47 | 0.014 |
| D1296 | S1296 | adAdCagdTdGuudCdTugdCdTcudAdTasa | AS1296 | dTdTaudAdGagdCdAagdAdAcadCdTgudTsdTsu | 0.12 | 0.21 | 0.68 | 0.0146 |
| D1297 | S1297 | AfacaGfUfGfuUfcUfuGfcUfcUfaUfasAf | AS1297 | uUfaUfaGfaGfcAfaGfaAfcacUfGfUfusUfsu | 0.06 | 0.15 | 0.50 | 0.016 |
| D1298 | S1298 | AfaCfaGfUfGfuUfcUfuGfcUfcUfauasAf | AS1298 | uUfAfUfaGfaGfcAfaGfaAfcacUfgUfusUfsu | 0.08 | 0.17 | 0.50 | 0.016 |
| D1299 | S1299 | AfaCfaguGfuUfcUfuGfcUfcUfaUfasAf | AS1299 | uUfaUfaGfaGfcAfaGfaAfcAfCfUfgUfususu | 0.07 | 0.16 | 0.50 | 0.018 |
| D1300 | S1300 | AfaCfaGfuGfuUfcUfUfGfcUfcUfauasAf | AS1300 | uUfAfUfaGfaGfcaaGfaAfcAfcUfgUfusUfsu | 0.06 | 0.12 | 0.43 | 0.020 |
| D1301 | S1301 | AfaCfaGfUfGfuUfcUfugcUfcUfaUfasAf | AS1301 | uUfaUfaGfaGfCfAfaGfaAfcacUfgUfusUfsu | 0.07 | 0.17 | 0.45 | 0.021 |
| D1302 | S1302 | AfaCfaGfuguUfcUfUfGfcUfcUfaUfasAf | AS1302 | uUfaUfaGfaGfcaaGfaAfCfAfcUfgUfusUfsu | 0.06 | 0.14 | 0.49 | 0.021 |
| D1303 | S1303 | AfAfCfaguGfuUfcUfuGfcUfcUfaUfasAf | AS1303 | uUfaUfaGfaGfcAfaGfaAfcAfCfUfguusUfsu | 0.07 | 0.24 | 0.51 | 0.022 |
| D1304 | S1304 | AfaCfaGfuGfuucUfuGfcUfcUfaUfasAf | AS1304 | uUfaUfaGfaGfcAfaGfAfAfcAfcUfgUfususu | 0.09 | 0.27 | 0.47 | 0.033 |
| D1305 | S1305 | aadCdAgudGdTucdTdTgcdTdCuadTdAsa | AS1305 | udTadTdAgadGdCaadGdAacdAdCugdTdTsusu | 0.19 | 0.36 | 0.86 | 0.045 |
| D1306 | S1306 | AfacaGfuguUfcUfuGfdCUdCUdAudAsa | AS1306 | dTUdAUdAGfaGfcAfaGfaAfCfAfcUfGfUfusUfsu | 0.08 | 0.22 | 0.61 | |
| D1307 | S1307 | AfacaGfuguUfcUfdTGfdCUdCUdAudAsa | AS1307 | dTUdAUdAGfaGfcAfaGfaAfCfAfcUfGfUfusUfsu | 0.13 | 0.39 | 0.84 | |
| D1308 | S1308 | AfacaGfuguUfcUfuGfdCUdCUdAudAsa | AS1308 | dTUdAUdAgdAGfcAfaGfaAfcAfcUfgUfusUfsu | 0.09 | 0.13 | 0.48 | |
| D1309 | S1309 | AfacaGfuguUfcUfdTGfdCUdCUdAudAsa | AS1309 | dTUdAUdAgdAGfdCAfaGfaAfcAfcUfgUfusUfsu | 0.07 | 0.13 | 0.58 | |
| D1310 | S1310 | AfacaAfuguUfcUfdTGfdCUdCudAudAsa | AS1310 | dTUdAudAgdAGfdCAfaGfaAfcAfcAfgUfusUfsu | 0.07 | 0.14 | 0.55 | |
| D1311 | S1311 | AfaCfaAfuGfuUfcUfuGfcUfcUfdAdTdAsdA | AS1311 | dTdTdAdTaGfaGfcAfaGfaAfcAfcAfgUfusUfsu | 0.10 | 0.30 | 0.66 | |
| D1312 | S1312 | AfacaGfuguUfcUfuGfdCUdCUdAudAsa | AS1312 | dTUdAUdAgdAGfcAfaGfaAfcAfcUfgUfusUfsu | 0.09 | 0.13 | 0.48 | |
| D1313 | S1313 | AfAfCfaGfuGfuucUfuGfcUfcUfaUfasAf | AS1313 | uUfaUfaGfaGfcAfaGfAfAfcAfcUfguusUfsu | 0.14 | 0.38 | 0.74 | |
| D1314 | S1314 | AfaCfaGfuGfuUfcUfuGfcUfcUfaUfasAf | AS1314 | uUfaUfaGfaGfcAfaGfaAfcAfcUfgUfusUfsu | 0.07 | 0.19 | 0.54 | |
| D1315 | S1315 | AfaCfaGfuGfuUfcUfuGfcUfcUfaUfasAf | AS1315 | uUfaUfaGfaGfcAfaGfaAfcAfcUfgUfusUfsu | 0.07 | 0.15 | 0.55 | |
| D1316 | S1316 | AfaCfaGfuGfuUfcUfuGfcUfcUfauasAf | AS1316 | uUfAfUfaGfaGfcAfaGfaAfcAfcUfgUfususu | 0.07 | 0.16 | 0.53 | |
| D1317 | S1317 | AfacaGfuGfuUfcUfuGfcUfcUfaUfasAf | AS1317 | uUfaUfaGfaGfcAfaGfaAfcAfcUfGfUfususu | 0.07 | 0.16 | 0.55 | |
| D1318 | S1318 | AfAfCfaGfuguUfcUfuGfcUfcUfaUfasAf | AS1318 | uUfaUfaGfaGfcAfaGfaAfCfAfcUfguusUfsu | 0.10 | 0.32 | 0.61 | |
| D1319 | S1319 | AfaCfaGfuGfuUfcUfuGfcUfcUfaUfasAf | AS1319 | uUfaUfaGfaGfcAfaGfaAfcAfcUfgUfususu | 0.08 | 0.16 | 0.53 | |
| D1320 | S1320 | AfaCfaGfuGfuUfcUfuGfcUfcUfaUfasAf | AS1320 | uUfaUfaGfaGfcAfaGfaAfcAfcUfgUfususu | 0.08 | 0.16 | 0.61 | |
| D1321 | S1321 | AfaCfaGfuGfuUfcUfuGfcUfCfUfaUfasAf | AS1321 | uUfaUfagaGfcAfaGfaAfcAfcUfgUfusUfsu | 0.06 | 0.14 | 0.58 | |
| D1322 | S1322 | AfaCfaGfuGfuUfcuuGfcUfcUfaUfasAf | AS1322 | uUfaUfaGfaGfcAfAfGfaAfcAfcUfgUfusUfsu | 0.15 | 0.49 | 0.84 | |
| D1323 | S1323 | AfaCfaGfuGfuUfcUfuGfcUfcuaUfasAf | AS1323 | uUfaUfAfGfaGfcAfaGfaAfcAfcUfgUfususu | 0.07 | 0.20 | 0.62 | |
| D1324 | S1324 | AfAfCfaGfuGfuUfcUfuGfcUfcUfaUfasAf | AS1324 | uUfaUfaGfaGfcAfaGfaAfcAfcUfguusUfsu | 0.08 | 0.25 | 0.78 | |
| D1325 | S1325 | AfAfCfaGfuGfuUfcUfuGfcUfcUfaUfasAf | AS1325 | uUfaUfaGfaGfcAfaGfaAfcAfcUfguusUfsu | 0.08 | 0.18 | 0.80 | |
| D1326 | S1326 | AfaCfaGfuGfuUfcUfuGfcUfcUfAfUfasAf | AS1326 | uUfauaGfaGfcAfaGfaAfcAfcUfgUfusUfsu | 0.07 | 0.21 | 0.66 | |
| D1327 | S1327 | AfaCfaGfuGfuucUfuGfcUfcUfaUfasAf | AS1327 | uUfaUfaGfaGfcAfaGfAfAfcAfcUfgUfusUfsu | 0.10 | 0.31 | 0.70 | |
| D1328 | S1328 | AfAfCfaGfuGfuUfcUfuGfcUfcUfauasAf | AS1328 | uUfAfUfaGfaGfcAfaGfaAfcAfcUfguusUfsu | 0.07 | 0.15 | 0.55 | |
| D1329 | S1329 | AfaCfAfGfuGfuUfcUfuGfcUfcUfaUfasAf | AS1329 | uUfaUfaGfaGfcAfaGfaAfcAfcugUfusUfsu | 0.08 | 0.19 | 0.71 | |
| D1330 | S1330 | AfaCfaGfuGfuUfcUfuGfcUfcUfaUfAfsAf | AS1330 | uuaUfaGfaGfcAfaGfaAfcAfcUfgUfusUfsu | 0.09 | 0.27 | 0.76 | |
| D1331 | S1331 | AfaCfaGfuguUfcUfuGfcUfcUfaUfasAf | AS1331 | uUfaUfaGfaGfcAfaGfaAfCfAfcUfgUfusUfsu | 0.07 | 0.21 | 0.65 | |
| D1332 | S1332 | AfAfCfaGfuGfuUfcUfuGfcUfcuaUfasAf | AS1332 | uUfaUfAfGfaGfcAfaGfaAfcAfcUfguusUfsu | 0.07 | 0.17 | 0.53 | |
| D1333 | S1333 | AfaCfaGfUfGfuUfcUfuGfcUfcUfaUfasAf | AS1333 | uUfaUfaGfaGfcAfaGfaAfcacUfgUfusUfsu | 0.08 | 0.25 | 0.73 | |
| D1334 | S1334 | AfaCfaguGfuUfcUfuGfcUfcUfaUfasAf | AS1334 | uUfaUfaGfaGfcAfaGfaAfcAfCfUfgUfusUfsu | 0.07 | 0.18 | 0.54 | |
| D1335 | S1335 | AfaCfaGfuGfuUfcuuGfcUfcUfaUfasAf | AS1335 | uUfaUfaGfaGfcAfAfGfaAfcAfcUfgUfususu | 0.14 | 0.38 | 0.57 | |
| D1336 | S1336 | AfaCfaGfuGfUfUfcUfuGfcUfcUfaUfasAf | AS1336 | uUfaUfaGfaGfcAfaGfaacAfcUfgUfusUfsu | 0.16 | 0.50 | 0.96 | |
| D1337 | S1337 | AfaCfaGfuGfuUfcUfuGfcUfcUfauasAf | AS1337 | uUfAfUfaGfaGfcAfaGfaAfcAfcUfgUfusUfsu | 0.08 | 0.19 | 0.54 | |
| D1338 | S1338 | AfAfCfaGfuGfuUfcUfugcUfcUfaUfasAf | AS1338 | uUfaUfaGfaGfCfAfaGfaAfcAfcUfguusUfsu | 0.08 | 0.20 | 0.69 | |
| D1339 | S1339 | AfaCfaGfuGfuUfCfUfuGfcUfcUfaUfasAf | AS1339 | uUfaUfaGfaGfcAfagaAfcAfcUfgUfusUfsu | 0.07 | 0.16 | 0.55 | |
| D1340 | S1340 | AfaCfaGfuGfuUfcUfuGfcUfcuaUfasAf | AS1340 | uUfaUfAfGfaGfcAfaGfaAfcAfcUfgUfusUfsu | 0.08 | 0.17 | 0.57 | |
| D1341 | S1341 | AfaCfaGfuguUfcUfuGfcUfcUfaUfasAf | AS1341 | uUfaUfaGfaGfcAfaGfaAfCfAfcUfgUfususu | 0.08 | 0.22 | 0.63 | |
| D1342 | S1342 | AfAfCfaGfuGfuUfcuuGfcUfcUfaUfasAf | AS1342 | uUfaUfaGfaGfcAfAfGfaAfcAfcUfguusUfsu | 0.21 | 0.56 | 0.86 | |
| D1343 | S1343 | AfacaGfuGfUfUfcUfuGfcUfcUfaUfasAf | AS1343 | uUfaUfaGfaGfcAfaGfaacAfcUfGfUfusUfsu | 0.14 | 0.37 | 0.73 | |
| D1344 | S1344 | AfaCfaGfuGfuucUfUfGfcUfcUfaUfasAf | AS1344 | uUfaUfaGfaGfcaaGfAfAfcAfcUfgUfusUfsu | 0.08 | 0.20 | 0.66 | |
| D1345 | S1345 | AfaCfAfGfuGfuUfcuuGfcUfcUfaUfasAf | AS1345 | uUfaUfaGfaGfcAfAfGfaAfcAfcugUfusUfsu | 0.12 | 0.34 | 0.73 | |
| D1346 | S1346 | AfaCfaGfuGfUfUfcUfuGfcUfcUfauasAf | AS1346 | uUfAfUfaGfaGfcAfaGfaacAfcUfgUfusUfsu | 0.16 | 0.42 | 0.90 | |
| D1347 | S1347 | AfaCfaGfuGfUfUfcUfuGfcUfcUfaUfasAf | AS1347 | uUfaUfaGfaGfcAfaGfaacAfcUfgUfusUfsUf | 0.17 | 0.43 | 0.85 | |
| D1348 | S1348 | AfaCfAfGfuGfuucUfuGfcUfcUfaUfasAf | AS1348 | uUfaUfaGfaGfcAfaGfAfAfcAfcugUfusUfsu | 0.08 | 0.21 | 0.58 | |
| D1349 | S1349 | AfaCfaGfuGfUfUfcUfuGfcUfcuaUfasAf | AS1349 | uUfaUfAfGfaGfcAfaGfaacAfcUfgUfusUfsu | 0.21 | 0.39 | 0.88 | |
| D1350 | S1350 | AfaCfaguGfuUfcUfUfGfcUfcUfaUfasAf | AS1350 | uUfaUfaGfaGfcaaGfaAfcAfCfUfgUfusUfsu | 0.06 | 0.13 | 0.52 | |
| D1351 | S1351 | AfaCfAfGfuguUfcUfuGfcUfcUfaUfasAf | AS1351 | uUfaUfaGfaGfcAfaGfaAfCfAfcugUfusUfsu | 0.08 | 0.21 | 0.58 | |
| D1352 | S1352 | AfaCfaGfUfGfuUfcuuGfcUfcUfaUfasAf | AS1352 | uUfaUfaGfaGfcAfAfGfaAfcacUfgUfusUfsu | 0.18 | 0.49 | 0.84 | |
| D1353 | S1353 | AfaCfaGfuGfUfUfcUfuGfcucUfaUfasAf | AS1353 | uUfaUfaGfAfGfcAfaGfaacAfcUfgUfusUfsu | 0.11 | 0.25 | 0.68 | |
| D1354 | S1354 | AfacaGfuGfuUfcUfUfGfcUfcUfaUfasAf | AS1354 | uUfaUfaGfaGfcaaGfaAfcAfcUfGfUfusUfsu | 0.07 | 0.15 | 0.52 | |
| D1355 | S1355 | AfaCfaGfUfGfuucUfuGfcUfcUfaUfasAf | AS1355 | uUfaUfaGfaGfcAfaGfAfAfcacUfgUfusUfsu | 0.10 | 0.26 | 0.63 | |
| D1356 | S1356 | AfaCfaGfuGfUfUfcUfugcUfcUfaUfasAf | AS1356 | uUfaUfaGfaGfCfAfaGfaacAfcUfgUfusUfsu | 0.16 | 0.33 | 0.79 | |
| D1357 | S1357 | AfaCfAfGfuGfuUfcUfuGfcUfcUfaUfasAf | AS1357 | uUfaUfaGfaGfcAfaGfaAfcAfcugUfusUfsUf | 0.09 | 0.19 | 0.51 | |
| D1358 | S1358 | AfaCfaGfuGfUfUfcuuGfcUfcUfaUfasAf | AS1358 | uUfaUfaGfaGfcAfAfGfaacAfcUfgUfusUfsu | 0.22 | 0.48 | 0.71 | |
| D1359 | S1359 | AfaCfaGfuGfuUfcUfUfGfcUfcUfaUfasAf | AS1359 | uUfaUfaGfaGfcaaGfaAfcAfcUfgUfusUfsUf | 0.10 | 0.17 | 0.61 | |
| D1360 | S1360 | AfaCfaguGfUfUfcUfuGfcUfcUfaUfasAf | AS1360 | uUfaUfaGfaGfcAfaGfaacAfCfUfgUfusUfsu | 0.14 | 0.40 | 0.87 | |
| D1361 | S1361 | AfaCfaGfuGfuUfcUfUfGfcUfcuaUfasAf | AS1361 | uUfaUfAfGfaGfcaaGfaAfcAfcUfgUfusUfsu | 0.07 | 0.14 | 0.52 | |
| D1362 | S1362 | aaCfaGfuGfuUfcUfuGfCfUfcUfaUfasAf | AS1362 | uUfaUfaGfagcAfaGfaAfcAfcUfgUfUfsUfsu | 0.10 | 0.28 | 0.81 | |
| D1363 | S1363 | AfaCfaGfuGfuucUfuGfcUfcUfAfUfasAf | AS1363 | uUfauaGfaGfcAfaGfAfAfcAfcUfgUfusUfsu | 0.06 | 0.16 | 0.68 | |
| D1364 | S1364 | AfaCfaGfuGfuUfcUfugcUfcUfaUfAfsAf | AS1364 | uuaUfaGfaGfCfAfaGfaAfcAfcUfgUfusUfsu | 0.09 | 0.26 | 0.67 | |
| D1365 | S1365 | aacaguguucuugcucuauasa | AS1365 | uUfaUfaGfaGfcAfaGfaAfcAfcUfgUfusUfsu | 0.20 | 0.59 | 0.95 | |
| D1366 | S1366 | AfaCfaGfuGfuUfcUfuGfCfUfcUfauasAf | AS1366 | uUfAfUfaGfagcAfaGfaAfcAfcUfgUfusUfsu | 0.06 | 0.13 | 0.53 | |
| D1367 | S1367 | AfaCfaGfuGfuUfcUfuGfCfUfcUfaUfasAf | AS1367 | uUfaUfaGfagcAfaGfaAfcAfcUfgUfusUfsUf | 0.08 | 0.16 | 0.53 | |
| D1368 | S1368 | AfaCfaGfuguUfcUfuGfcUfcUfAfUfasAf | AS1368 | uUfauaGfaGfcAfaGfaAfCfAfcUfgUfusUfsu | 0.07 | 0.15 | 0.54 | |
| D1369 | S1369 | AfaCfaGfuGfuUfcuuGfcUfcUfaUfAfsAf | AS1369 | uuaUfaGfaGfcAfAfGfaAfcAfcUfgUfusUfsu | 0.23 | 0.56 | 0.89 | |
| D1370 | S1370 | AfaCfaGfuGfuUfcUfuGfCfUfcuaUfasAf | AS1370 | uUfaUfAfGfagcAfaGfaAfcAfcUfgUfusUfsu | 0.06 | 0.12 | 0.55 | |
| D1371 | S1371 | AfaCfaGfuGfuUfcUfuGfCfUfcuaUfasAf | AS1371 | uUfaUfAfGfagcAfaGfaAfcAfcUfgUfusUfsu | 0.07 | 0.18 | 0.58 | |
| D1372 | S1372 | AfaCfaguGfuUfcUfuGfcUfcUfAfUfasAf | AS1372 | uUfauaGfaGfcAfaGfaAfcAfCfUfgUfusUfsu | 0.06 | 0.15 | 0.56 | |
| D1373 | S1373 | AfaCfaGfuGfuucUfuGfcUfcUfaUfAfsAf | AS1373 | uuaUfaGfaGfcAfaGfAfAfcAfcUfgUfusUfsu | 0.21 | 0.51 | 0.89 | |
| D1374 | S1374 | AfacaGfuguUfcUfuGfcUfcUfaUfasAf | AS1374 | uUfaUfaGfaGfcAfaGfaAfCfAfcUfGfUfusUfsu | 0.08 | 0.21 | 0.64 | |
| D1375 | S1375 | AfaCfaGfuGfuUfcuuGfCfUfcUfaUfasAf | AS1375 | uUfaUfaGfagcAfAfGfaAfcAfcUfgUfusUfsu | 0.15 | 0.40 | 0.94 | |
| D1376 | S1376 | AfaCfaGfuGfuUfcuuGfCfUfcUfaUfasAf | AS1376 | uUfaUfaGfagcAfAfGfaAfcAfcUfgUfusUfsu | 0.13 | 0.40 | 0.96 | |
| D1377 | S1377 | AfaCfaGfuGfuUfcUfuGfcUfCfUfauasAf | AS1377 | uUfAfUfagaGfcAfaGfaAfcAfcUfgUfusUfsu | 0.08 | 0.17 | 0.64 | |
| D1378 | S1378 | AfaCfaGfuguUfcUfuGfcUfcUfaUfAfsAf | AS1378 | uuaUfaGfaGfcAfaGfaAfCfAfcUfgUfusUfsu | 0.18 | 0.50 | 0.97 | |
| D1379 | S1379 | AfaCfaGfuGfuucUfuGfCfUfcUfaUfasAf | AS1379 | uUfaUfaGfagcAfaGfAfAfcAfcUfgUfusUfsu | 0.08 | 0.24 | 0.79 | |
| D1380 | S1380 | aaCfaGfuGfuUfcUfuGfcUfcUfAfUfasAf | AS1380 | uUfauaGfaGfcAfaGfaAfcAfcUfgUfUfsUfsu | 0.07 | 0.14 | 0.58 | |
| D1381 | S1381 | AfaCfaguGfuUfcUfuGfcUfcUfaUfAfsAf | AS1381 | uuaUfaGfaGfcAfaGfaAfcAfCfUfgUfusUfsu | 0.11 | 0.34 | 0.96 | |
| D1382 | S1382 | AfaCfaGfuguUfcUfuGfCfUfcUfaUfasAf | AS1382 | uUfaUfaGfagcAfaGfaAfCfAfcUfgUfusUfsu | 0.08 | 0.18 | 0.69 | |
| D1383 | S1383 | AfaCfaGfuGfuUfcuuGfcUfCfUfaUfasAf | AS1383 | uUfaUfagaGfcAfAfGfaAfcAfcUfgUfusUfsu | 0.14 | 0.38 | 0.85 | |
| D1384 | S1384 | AfaCfaGfuGfuUfcUfuGfcUfcUfAfUfasAf | AS1384 | uUfauaGfaGfcAfaGfaAfcAfcUfgUfusUfsUf | 0.07 | 0.16 | 0.54 | |
| D1385 | S1385 | AfacaGfuGfuUfcUfuGfcUfcUfaUfAfsAf | AS1385 | uuaUfaGfaGfcAfaGfaAfcAfcUfGfUfusUfsu | 0.08 | 0.20 | 0.75 | |
| D1386 | S1386 | aacaguguucUfuGfcUcUaudAsa | AS1386 | uUfdAUdAGfaGfcAfaGfaadCadCudGdTdTsusu | 0.25 | 0.56 | 0.90 | |
| D1387 | S1387 | AfaCfaguGfuUfcUfuGfCfUfcUfaUfasAf | AS1387 | uUfaUfaGfagcAfaGfaAfcAfCfUfgUfusUfsu | 0.08 | 0.19 | 0.70 | |
| D1388 | S1388 | AfaCfaGfuGfuucUfuGfcUfCfUfaUfasAf | AS1388 | uUfaUfagaGfcAfaGfAfAfcAfcUfgUfusUfsu | 0.08 | 0.14 | 0.60 | |
| D1389 | S1389 | AfaCfaGfuGfuUfcUfuGfcUfcuaUfAfsAf | AS1389 | uuaUfAfGfaGfcAfaGfaAfcAfcUfgUfusUfsu | 0.08 | 0.19 | 0.62 | |
| D1390 | S1390 | aaCfaGfuGfuUfcUfuGfcUfcUfaUfAfsAf | AS1390 | uuaUfaGfaGfcAfaGfaAfcAfcUfgUfUfsUfsu | 0.08 | 0.27 | 0.76 | |
| D1391 | S1391 | aacaguguucdTudGcdTcdTadTasa | AS1391 | uUfdAUdAGfaGfcAfaGfaadCadCudGudTsusu | 0.18 | 0.36 | 0.81 | |
| D1392 | S1392 | AfacaGfuGfuUfcUfuGfCfUfcUfaUfasAf | AS1392 | uUfaUfaGfagcAfaGfaAfcAfcUfGfUfusUfsu | 0.07 | 0.17 | 0.55 | |
| D1393 | S1393 | AfaCfaGfuguUfcUfuGfcUfCfUfaUfasAf | AS1393 | uUfaUfagaGfcAfaGfaAfCfAfcUfgUfusUfsu | 0.07 | 0.15 | 0.57 | |
| D1394 | S1394 | AfaCfaGfuGfuUfcuuGfcUfcUfAfUfasAf | AS1394 | uUfauaGfaGfcAfAfGfaAfcAfcUfgUfusUfsu | 0.26 | 0.68 | 1.06 | |
| D1395 | S1395 | AfaCfaGfuGfuUfcUfuGfcucUfaUfAfsAf | AS1395 | uuaUfaGfAfGfcAfaGfaAfcAfcUfgUfusUfsu | 0.06 | 0.18 | 0.58 | |
| D1396 | S1396 | AfaCfaGfuGfuUfcUfuGfcUfcUfaUfAfsAf | AS1396 | uuaUfaGfaGfcAfaGfaAfcAfcUfgUfusUfsUf | 0.09 | 0.27 | 0.73 | |
| D1397 | S1397 | AfaCfaAfuGfuUfcUfuGfcdAdCdTdAUfasAf | AS1397 | uUfadTdAdGdAGfcAfaGfaGfcAfcAfgUfusUfsu | 0.20 | 0.51 | 0.73 | |
| D1398 | S1398 | AfacaGfuguUfcuuGfcucUfauasAf | AS1398 | uUfAfUfaGfAfGfcAfAfGfaAfCfAfcUfGfUfusUfsu | 0.13 | 0.34 | 0.86 | |
| D1399 | S1399 | dAacadGugudTcuudGcucdTauasdA | AS1399 | udTdAdTadGdAdGcdAdAdGadAdCdAcdTdGdTusdTsu | 0.24 | 0.42 | 0.82 | |
| D1400 | S1400 | AfaCfaAfuGfuUfcUfuGfdCdAdCdTaUfasAf | AS1400 | uUfaUfdAdGdAdGcAfaGfaGfcAfcAfgUfusUfsu | 0.49 | 0.85 | 0.78 | |
| D1401 | S1401 | AfaCfaAfuGfuUfcUfudGdCdAdCUfaUfasAf | AS1401 | uUfaUfadGdAdGdCAfaGfaGfcAfcAfgUfusUfsu | 0.67 | 0.83 | 0.85 | |
| D1402 | S1402 | aaCfAfguGfUfucUfUfgcUfCfuaUfAfsa | AS1402 | uUfaUfAfgaGfCfaaGfAfacAfCfugUfUfsusu | 0.18 | 0.47 | 0.80 | |
| D1403 | S1403 | AfaCfaAfuGfuUfcUfuGfcdAdCUfadTdAsAf | AS1403 | udTdAUfadGdAGfcAfaGfaGfcAfcAfgUfusUfsu | 0.73 | 0.89 | 0.77 | |
| D1404 | S1404 | aacAgugUucuUgcuCuauAsa | AS1404 | uUaUAgAGCaAGAaCACuGUUsusu | 0.12 | 0.39 | 0.79 | |
| D1405 | S1405 | AacaGuguUcuuGcucUauasA | AS1405 | uUAUaGAGcAAGaACAcUGUusUsu | 0.12 | 0.37 | 0.77 | |
| D1406 | S1406 | AfaCfaAfuGfuUfcUfudGdCAfcUfadTdAsAf | AS1406 | udTdAUfaGfadGdCAfaGfaGfcAfcAfgUfusUfsu | 0.59 | 0.93 | 0.89 | |
| D1407 | S1407 | aACagUGuuCUugCUcuAUasa | AS1407 | UUauAGagCAagAAcaCUguUsUsu | 0.09 | 0.16 | 0.55 | |
| D1408 | S1408 | AfaCfaAfuGfuUfcUfuGfcAfcdTdAdTdAsAf | AS1408 | udTdAdTdAGfaGfcAfaGfaAfcAfcAfgUfusUfsu | 0.22 | 0.64 | 0.86 | |
| D1409 | S1409 | aaCAguGUucUUgcUCuaUAsa | AS1409 | uUaUAgaGCaaGAacACugUUsusu | 0.13 | 0.31 | 0.76 | |
| D1410 | S1410 | AfaCfaAfuGfuUfcUfuGfcAfdCdTdAdTdAsAf | AS1410 | udTdAdTdAdGaGfcAfaGfaGfcAfcAfgUfusUfsu | 0.77 | 0.94 | 0.93 | |
| D1411 | S1411 | aacAfgugUfucuUfgcuCfuauAfsa | AS1411 | uUfaUfAfgAfGfCfaAfGfAfaCfAfCfuGfUfUfsusu | 0.23 | 0.53 | 1.04 | |
| D1412 | S1412 | aacdAgugdTucudTgcudCuaudAsa | AS1412 | udTadTdAgdAdGdCadAdGdAadCdAdCudGdTdTsusu | 0.30 | 0.64 | 0.90 | |
| D1413 | S1413 | AfaCfaGfuGfuUfcUfuGfcUfcUfaUfasa | AS1413 | UfUfaUfaGfaGfcAfaGfaAfcAfcUfgUfusUfsu | 0.09 | 0.19 | 0.63 | |
| D1414 | S1414 | AfaCfaGfuGfUfUfcUfuGfcUfcUfaUfasa | AS1414 | UfUfaUfaGfaGfcAfaGfaacAfcUfgUfusUfsu | 0.11 | 0.28 | 0.66 | |
| D1415 | S1415 | AfaCfaGfuGfuUfcUfuGfCfUfcUfaUfasa | AS1415 | UfUfaUfaGfagcAfaGfaAfcAfcUfgUfusUfsu | 0.06 | 0.13 | 0.53 | |
| D1416 | S1416 | aacaguguucuugcucuauasa | AS1416 | UfUfAfUfAfGfAfGfCfAfAfGfAfAfCfAfCfUfGfUfUfsusu | 0.20 | 0.53 | 0.99 | |
| D1417 | S1417 | AfaCfaGfuGfuUfcUfuGfcUfcUfAfUfasa | AS1417 | UfUfauaGfaGfcAfaGfaAfcAfcUfgUfusUfsu | 0.07 | 0.17 | 0.53 | |
| D1418 | S1418 | aAfCfagUfGfuuCfUfugCfUfcuAfUfasa | AS1418 | UfUfauAfGfagCfAfagAfAfcaCfUfguUfsUfsu | 0.08 | 0.20 | 0.70 | |
| D1419 | S1419 | AfaCfAfGfuGfuUfcUfuGfcUfcUfaUfasAf | AS1419 | uUfaUfaGfaGfcAfaGfaAfcAfcugUfusUfsUf | 0.08 | 0.20 | 0.70 | |

### Example 3: In Vitro Silencing Activity With Various Chemical Modifications on TTR siRNA

[0331] The IC₅₀ for each modified siRNA is determined in Hep3B cells by standard reverse transfection using Lipofectamine RNAiMAX. In brief, reverse transfection is carried out by adding 5 μL of Opti-MEM to 5 μL of siRNA duplex per well into a 96-well plate along with 10 μL of Opti-MEM plus 0.5 μL of Lipofectamine RNAiMax per well (Invitrogen, Carlsbad CA. cat #13778-150) and incubating at room temperature for 15-20 minutes. Following incubation, 100 μL of complete growth media without antibiotic containing 12,000-15,000 Hep3B cells is then added to each well. Cells are incubated for 24 hours at 37° C. in an atmosphere of 5% CO2 prior to lysis and analysis of ApoB and GAPDH mRNA by bDNA (Quantigene). Seven different siRNA concentrations ranging from 10 nM to 0.6 pM are assessed for IC₅₀ determination and ApoB/GAPDH for ApoB transfected cells is normalized to cells transfected with 10 nM Luc siRNA.

| Abbreviation | Nucleotide(s) |
|---|---|
| Af | 2′-F-adenosine |
| Cf | 2′-F-cytidine |
| Gf | 2′-F-guanosine |
| Uf | 2′-F-uridine |
| A | adenosine |
| C | cytidine |
| G | guanosine |
| U | uridine |
| a | 2′-O-methyladenosine |
| c | 2′-O-methylcytidine |
| g | 2′-O-methylguanosine |
| u | 2′-O-methyluridine |
| dT | 2′-deoxythymidine |
| s | phosphorothioate linkage |

TABLE 3
ANGPTL3 modified duplex

| | | SS seq (SEQ ID NOS 845-1025, | | AS seq (SEQ ID NOS 1026-1206, | RNAimax, Hep3b | | |
|---|---|---|---|---|---|---|---|
| Duplex ID | Sense ID | respectively, in order of appearance) | AS ID | respectively, in order of appearance) | 10 nM | 0.1 nM | 0.025 nM |
| D2000 | S2000 | UfcAfcAfaUfuAfAfGfcUfcCfuUfcUfuUf | A2000 | aAfaGfaAfgGfaGfcuuAfaUfuGfuGfasAfsc | 0.036 | 0.274 | 0.233 |
| D2001 | S2001 | UfuAfuUfgUfuCfCfUfcUfaGfuUfaUfuUf | A2001 | aAfaUfaAfcUfaGfaggAfaCfaAfuAfasAfsa | 0.044 | 0.278 | 0.247 |
| D2002 | S2002 | GfcUfaUfgUfuAfGfAfcGfaUfgUfaAfaAf | A2002 | uUfuUfaCfaUfcGfucuAfaCfaUfaGfcsAfsa | 0.062 | 0.474 | 0.449 |
| D2003 | S2003 | GfgAfcAfuGfgUfCfUfuAfaAfgAfcUfuUf | A2003 | aAfaGfuCfuUfuAfagaCfcAfuGfuCfcsCfsa | 0.303 | 1.042 | 0.912 |
| D2004 | S2004 | CfaAfaAfaCfuCfAfAfcAfuAfuUfuGfaUf | A2004 | aUfcAfaAfuAfuGfuugAfgUfuUfuUfgsAfsa | 0.102 | 0.623 | 0.499 |
| D2005 | S2005 | AfcCfaGfuGfaAfAfUfcAfaAfgAfaGfaAf | A2005 | uUfcUfuCfuUfuGfauuUfcAfcUfgGfusUfsu | 0.124 | 0.901 | 0.756 |
| D2006 | S2006 | CfaCfaAfuUfaAfGfCfuCfcUfuCfuUfuUf | A2006 | aAfaAfgAfaGfgAfgcuUfaAfuUfgUfgsAfsa | 0.069 | 0.269 | 0.244 |
| D2007 | S2007 | CfuAfuGfuUfaGfAfCfgAfuGfuAfaAfaAf | A2007 | uUfuUfuAfcAfuCfgucUfaAfcAfuAfgsCfsa | 0.052 | 0.622 | 0.589 |
| D2008 | S2008 | UfcAfaCfaUfaUfUfUfgAfuCfaGfuCfuUf | A2008 | aAfgAfcUfgAfuCfaaaUfaUfgUfuGfasGfsu | 0.133 | 0.798 | 0.785 |
| D2009 | S2009 | AfaCfuGfaGfaAfGfAfaCfuAfcAfuAfuAf | A2009 | uAfuAfuGfuAfgUfucuUfcUfcAfgUfusCfsc | 0.097 | 0.671 | 0.528 |
| D2010 | S2010 | AfcAfaUfuAfaGfCfUfcCfuUfcUfuUfuUf | A2010 | aAfaAfaGfaAfgGfagcUfuAfaUfuGfusGfsa | 0.145 | 0.308 | 0.293 |
| D2011 | S2011 | CfuCfcAfgAfgCfCfAfaAfaUfcAfaGfaUf | A2011 | aUfcUfuGfaUfuUfuggCfuCfuGfgAfgsAfsu | 0.122 | 0.882 | 0.938 |
| D2012 | S2012 | CfgAfuGfuAfaAfAfAfuUfuUfaGfcCfaAf | A2012 | uUfgGfcUfaAfaAfuuuUfuAfcAfuCfgsUfsc | 0.102 | 0.843 | 0.733 |
| D2013 | S2013 | GfuCfuUfaAfaGfAfCfuUfuGfuCfcAfuAf | A2013 | uAfuGfgAfcAfaAfgucUfuUfaAfgAfcsCfsa | 1.133 | 1.105 | 1.022 |
| D2014 | S2014 | CfaAfcAfuAfuUfUfGfaUfcAfgUfcUfuUf | A2014 | aAfaGfaCfuGfaUfcaaAfuAfuGfuUfgsAfsg | 0.077 | 0.413 | 0.450 |
| D2015 | S2015 | AfcUfgAfgAfaGfAfAfcUfaCfaUfaUfaAf | A2015 | uUfaUfaUfgUfaGfuucUfuCfuCfaGfusUfsc | 0.055 | 0.293 | 0.364 |
| D2016 | S2016 | CfcAfgAfgCfcAfAfAfaUfcAfaGfaUfuUf | A2016 | aAfaUfcUfuGfaUfuuuGfgCfuCfuGfgsAfsg | 0.080 | 0.650 | 0.499 |
| D2017 | S2017 | GfaUfgUfaAfaAfAfUfuUfuAfgCfcAfaUf | A2017 | aUfuGfgCfuAfaAfauuUfuUfaCfaUfcsGfsu | 0.076 | 0.605 | 0.579 |
| D2018 | S2018 | UfcUfuAfaAfgAfCfUfuUfgUfcCfaUfaAf | A2018 | uUfaUfgGfaCfaAfaguCfuUfuAfaGfasCfsc | 1.326 | 1.098 | 0.927 |
| D2019 | S2019 | AfaCfaUfaUfuUfGfAfuCfaGfuCfuUfuUf | A2019 | aAfaAfgAfcUfgAfucaAfaUfaUfgUfusGfsa | 0.047 | 0.560 | 0.477 |
| D2020 | S2020 | CfuGfaGfaAfgAfAfCfuAfcAfuAfuAfaAf | A2020 | uUfuAfuAfuGfuAfguuCfuUfcUfcAfgsUfsu | 0.066 | 0.690 | 0.681 |
| D2021 | S2021 | AfaUfuAfaGfcUfCfCfuUfcUfuUfuUfaUf | A2021 | aUfaAfaAfaGfaAfggaGfcUfuAfaUfusGfsu | 0.041 | 0.611 | 0.251 |
| D2022 | S2022 | AfaAfuCfaAfgAfUfUfuGfcUfaUfgUfuAf | A2022 | uAfaCfaUfaGfcAfaauCfuUfgAfuUfusUfsg | 0.053 | 0.555 | 0.516 |
| D2023 | S2023 | UfuCfaGfuUfgGfGfAfcAfuGfgUfcUfuAf | A2023 | uAfaGfaCfcAfuGfuccCfaAfcUfgAfasGfsg | 0.779 | 1.045 | 0.963 |
| D2024 | S2024 | GfgGfcCfaAfaUfUfAfaUfgAfcAfuAfuUf | A2024 | aAfuAfuGfuCfaUfuaaUfuUfgGfcCfcsUfsu | 1.487 | 0.949 | 0.883 |
| D2025 | S2025 | AfcAfuAfuUfuGfAfUfcAfgUfcUfuUfuUf | A2025 | aAfaAfaGfaCfuGfaucAfaAfuAfuGfusUfsg | 0.043 | 0.432 | 0.477 |
| D2026 | S2026 | AfgAfaCfuAfcAfUfAfuAfaAfcUfaCfaAf | A2026 | uUfgUfaGfuUfuAfuauGfuAfgUfuCfusUfsc | 0.324 | 1.042 | 0.905 |
| D2027 | S2027 | AfuUfaAfgCfuCfCfUfuCfuUfuUfuAfuUf | A2027 | aAfuAfaAfaAfgAfaggAfgCfuUfaAfusUfsg | 0.042 | 0.283 | 0.224 |
| D2028 | S2028 | AfgAfuUfuGfcUfAfUfgUfuAfgAfcGfaUf | A2028 | aUfcGfuCfuAfaCfauaGfcAfaAfuCfusUfsg | 0.349 | 0.936 | 0.896 |
| D2029 | S2029 | UfcAfgUfuGfgGfAfCfaUfgGfuCfuUfaAf | A2029 | uUfaAfgAfcCfaUfgucCfcAfaCfuGfasAfsg | 0.914 | 0.907 | 0.944 |
| D2030 | S2030 | GfgCfcAfaAfuUfAfAfuGfaCfaUfaUfuUf | A2030 | aAfaUfaUfgUfcAfuuaAfuUfuGfgCfcsCfsu | 0.047 | 0.353 | 0.326 |
| D2031 | S2031 | CfaUfaUfuUfgAfUfCfaGfuCfuUfuUfuAf | A2031 | uAfaAfaAfgAfcUfgauCfaAfaUfaUfgsUfsu | 0.110 | 0.867 | 0.842 |
| D2032 | S2032 | UfaCfaUfaUfaAfAfCfuAfcAfaGfuCfaAf | A2032 | uUfgAfcUfuGfuAfguuUfaUfaUfgUfasGfsu | 0.200 | 0.699 | 0.656 |
| D2033 | S2033 | UfuUfuAfuUfgUfUfCfcUfcUfaGfuUfaUf | A2033 | aUfaAfcUfaGfaGfgaaCfaAfuAfaAfasAfsg | 0.050 | 0.218 | 0.192 |
| D2034 | S2034 | UfuGfcUfaUfgUfUfAfgAfcGfaUfgUfaAf | A2034 | uUfaCfaUfcGfuCfuaaCfaUfaGfcAfasAfsu | 0.096 | 0.792 | 0.640 |
| D2035 | S2035 | CfaGfuUfgGfgAfCfAfuGfgUfcUfuAfaAf | A2035 | uUfuAfaGfaCfcAfuguCfcCfaAfcUfgsAfsa | 0.127 | 0.936 | 0.890 |
| D2036 | S2036 | AfaAfuUfaAfuGfAfCfaUfaUfuUfcAfaAf | A2036 | uUfuGfaAfaUfaUfgucAfuUfaAfuUfusGfsg | 0.061 | 0.683 | 0.668 |
| D2037 | S2037 | GfaUfcAfgUfcUfUfUfuUfaUfgAfuCfuAf | A2037 | uAfgAfuCfaUfaAfaaaGfaCfuGfaUfcsAfsa | 0.157 | 1.010 | 0.723 |
| D2038 | S2038 | AfcAfuAfuAfaAfCfUfaCfaAfgUfcAfaAf | A2038 | uUfuGfaCfuUfgUfaguUfuAfuAfuGfusAfsg | 0.047 | 0.532 | 0.525 |
| D2039 | S2039 | UfuUfaUfuGfuUfCfCfuCfuAfgUfuAfuUf | A2039 | aAfuAfaCfuAfgAfggaAfcAfaUfaAfasAfsa | 0.031 | 0.505 | 0.238 |
| D2040 | S2040 | UfgCfuAfuGfuUfAfGfaCfgAfuGfuAfaAf | A2040 | uUfuAfcAfuCfgUfcuaAfcAfuAfgCfasAfsa | 0.056 | 0.484 | 0.408 |
| D2041 | S2041 | GfgGfaCfaUfgGfUfCfuUfaAfaGfaCfuUf | A2041 | aAfgUfcUfuUfaAfgacCfaUfgUfcCfcsAfsa | 0.570 | 0.999 | 0.994 |
| D2042 | S2042 | UfgAfcAfuAfuUfUfCfaAfaAfaCfuCfaAf | A2042 | uUfgAfgUfuUfuUfgaaAfuAfuGfuCfasUfsu | 0.065 | 0.870 | 0.728 |
| D2043 | S2043 | AfuCfaGfuCfuUfUfUfuAfuGfaUfcUfaUf | A2043 | aUfaGfaUfcAfuAfaaaAfgAfcUfgAfusCfsa | 0.048 | 0.362 | 0.282 |
| D2044 | S2044 | CfaUfaUfaAfaCfUfAfcAfaGfuCfaAfaAf | A2044 | uUfuUfgAfcUfuGfuagUfuUfaUfaUfgsUfsa | 0.314 | 0.904 | 0.937 |
| D2045 | S2045 | CfuUfgAfaCfuCfAfAfcUfcAfaAfaCfuUf | A2045 | aAfgUfuUfuGfaGfuugAfgUfuCfaAfgsUfsg | 0.060 | 0.295 | 0.251 |
| D2046 | S2046 | CfuAfcUfuCfaAfCfAfaAfaAfgUfgAfaAf | A2046 | uUfuCfaCfuUfuUfuguUfgAfaGfuAfgsAfsa | 0.052 | 0.570 | 0.599 |
| D2047 | S2047 | AfaGfaGfcAfaCfUfAfaCfuAfaCfuUfaAf | A2047 | uUfaAfgUfuAfgUfuagUfuGfcUfcUfusCfsu | 0.028 | 0.369 | 0.381 |
| D2048 | S2048 | AfaAfcAfaGfaUfAfAfuAfgCfaUfcAfaAf | A2048 | uUfuGfaUfgCfuAfuuaUfcUfuGfuUfusUfsu | 0.039 | 0.227 | 0.204 |
| D2049 | S2049 | GfcAfuAfgUfcAfAfAfuAfaAfaGfaAfaUf | A2049 | aUfuUfcUfuUfuAfuuuGfaCfuAfuGfcsUfsg | 0.032 | 0.437 | 0.422 |
| D2050 | S2050 | AfuAfuAfaAfcUfAfCfaAfgUfcAfaAfaAf | A2050 | uUfuUfuGfaCfuUfguaGfuUfuAfuAfusGfsu | 0.297 | 0.946 | 0.850 |
| D2051 | S2051 | GfaAfcUfcAfaCfUfCfaAfaAfcUfuGfaAf | A2051 | uUfcAfaGfuUfuUfgagUfuGfaGfuUfcsAfsa | 0.179 | 0.929 | 0.884 |
| D2052 | S2052 | UfaCfuUfcAfaCfAfAfaAfaGfuGfaAfaUf | A2052 | aUfuUfcAfcUfuUfuugUfuGfaAfgUfasGfsa | 0.091 | 0.536 | 0.524 |
| D2053 | S2053 | AfgAfgCfaAfcUfAfAfcUfaAfcUfuAfaUf | A2053 | aUfuAfaGfuUfaGfuuaGfuUfgCfuCfusUfsc | 0.086 | 0.611 | 0.621 |
| D2054 | S2054 | GfaUfaAfuAfgCfAfUfcAfaAfgAfcCfuUf | A2054 | aAfgGfuCfuUfuGfaugCfuAfuUfaUfcsUfsu | 0.058 | 0.676 | 0.591 |
| D2055 | S2055 | CfaUfaGfuCfaAfAfUfaAfaAfgAfaAfuAf | A2055 | uAfuUfuCfuUfuUfauuUfgAfcUfaUfgsCfsu | 0.048 | 0.630 | 0.674 |
| D2056 | S2056 | UfaUfaAfaCfuAfCfAfaGfuCfaAfaAfaUf | A2056 | aUfuUfuUfgAfcUfuguAfgUfuUfaUfasUfsg | 0.072 | 0.534 | 0.459 |
| D2057 | S2057 | AfaCfuCfaAfcUfCfAfaAfaCfuUfgAfaAf | A2057 | uUfuCfaAfgUfuUfugaGfuUfgAfgUfusCfsa | 0.161 | 0.864 | 0.775 |
| D2058 | S2058 | AfcUfuCfaAfcAfAfAfaAfgUfgAfaAfuAf | A2058 | uAfuUfuCfaCfuUfuuuGfuUfgAfaGfusAfsg | 0.198 | 0.969 | 0.865 |
| D2059 | S2059 | GfaGfcAfaCfuAfAfCfuAfaCfuUfaAfuUf | A2059 | aAfuUfaAfgUfuAfguuAfgUfuGfcUfcsUfsu | 0.031 | 0.253 | 0.210 |
| D2060 | S2060 | AfaCfcAfaCfaGfCfAfuAfgUfcAfaAfuAf | A2060 | uAfuUfuGfaCfuAfugcUfgUfuGfgUfusUfsa | 0.035 | 0.561 | 0.569 |
| D2061 | S2061 | AfgUfcAfaAfuAfAfAfaGfaAfaUfaGfaAf | A2061 | uUfcUfaUfuUfcUfuuuAfuUfuGfaCfusAfsu | 0.057 | 0.668 | 0.386 |
| D2062 | S2062 | AfgUfcAfaAfaAfUfGfaAfgAfgGfuAfaAf | A2062 | uUfuAfcCfuCfuUfcauUfuUfuGfaCfusUfsg | 0.720 | 1.017 | 0.924 |
| D2063 | S2063 | CfuUfgAfaAfgCfCfUfcCfuAfgAfaGfaAf | A2063 | uUfcUfuCfuAfgGfaggCfuUfuCfaAfgsUfsu | 0.324 | 1.020 | 0.963 |
| D2064 | S2064 | CfuUfcAfaCfaAfAfAfaGfuGfaAfaUfaUf | A2064 | aUfaUfuUfcAfcUfuuuUfgUfuGfaAfgsUfsa | 0.048 | 0.549 | 0.531 |
| D2065 | S2065 | CfaAfcUfaAfcUfAfAfcUfuAfaUfuCfaAf | A2065 | uUfgAfaUfuAfaGfuuaGfuUfaGfuUfgsCfsu | 0.046 | 0.739 | 0.649 |
| D2066 | S2066 | AfcCfaAfcAfgCfAfUfaGfuCfaAfaUfaAf | A2066 | uUfaUfuUfgAfcUfaugCfuGfuUfgGfusUfsu | 0.076 | 0.840 | 0.777 |
| D2067 | S2067 | GfaAfcCfcAfcAfGfAfaAfuUfuCfuCfuAf | A2067 | uAfgAfgAfaAfuUfucuGfuGfgGfuUfcsUfsu | 0.103 | 0.916 | 0.808 |
| D2068 | S2068 | GfaAfuAfuGfuCfAfCfuUfgAfaCfuCfaAf | A2068 | uUfgAfgUfuCfaAfgugAfcAfuAfuUfcsUfsu | 0.046 | 0.532 | 0.520 |
| D2069 | S2069 | UfgAfaAfgCfcUfCfCfuAfgAfaGfaAfaAf | A2069 | uUfuUfcUfuCfuAfggaGfgCfuUfuCfasAfsg | 0.067 | 0.894 | 0.822 |
| D2070 | S2070 | UfuCfaAfcAfaAfAfAfgUfgAfaAfuAfuUf | A2070 | aAfuAfuUfuCfaCfuuuUfuGfuUfgAfasGfsu | 0.052 | 0.557 | 0.395 |
| D2071 | S2071 | AfaCfuAfaCfuAfAfCfuUfaAfuUfcAfaAf | A2071 | uUfuGfaAfuUfaAfguuAfgUfuAfgUfusGfsc | 0.025 | 0.220 | 0.232 |
| D2072 | S2072 | CfcAfaCfaGfcAfUfAfgUfcAfaAfuAfaAf | A2072 | uUfuAfuUfuGfaCfuauGfcUfgUfuGfgsUfsu | 0.293 | 0.923 | 0.899 |
| D2073 | S2073 | AfaCfcCfaCfaGfAfAfaUfuUfcUfcUfaUf | A2073 | aUfaGfaGfaAfaUfuucUfgUfgGfgUfusCfsu | 0.021 | 0.375 | 0.356 |
| D2074 | S2074 | UfgUfcAfcUfuGfAfAfcUfcAfaCfuCfaAf | A2074 | uUfgAfgUfuGfaGfuucAfaGfuGfaCfasUfsa | 0.052 | 0.402 | 0.513 |
| D2075 | S2075 | GfaAfaGfcCfuCfCfUfaGfaAfgAfaAfaAf | A2075 | uUfuUfuCfuUfcUfaggAfgGfcUfuUfcsAfsa | 0.171 | 0.904 | 0.893 |
| D2076 | S2076 | AfaUfaUfuUfaGfAfAfgAfgCfaAfcUfaAf | A2076 | uUfaGfuUfgCfuCfuucUfaAfaUfaUfusUfsc | 0.142 | 0.614 | 0.688 |
| D2077 | S2077 | AfcUfaAfcUfaAfCfUfuAfaUfuCfaAfaAf | A2077 | uUfuUfgAfaUfuAfaguUfaGfuUfaGfusUfsg | 0.020 | 0.312 | 0.316 |
| D2078 | S2078 | CfaAfcAfgCfaUfAfGfuCfaAfaUfaAfaAf | A2078 | uUfuUfaUfuUfgAfcuaUfgCfuGfuUfgsGfsu | 0.026 | 0.313 | 0.393 |
| D2079 | S2079 | CfcAfcAfgAfaAfUfUfuCfuCfuAfuCfuUf | A2079 | aAfgAfuAfgAfgAfaauUfuCfuGfuGfgsGfsu | 0.012 | 0.596 | 0.345 |
| D2080 | S2080 | GfuCfaCfuUfgAfAfCfuCfaAfcUfcAfaAf | A2080 | uUfuGfaGfuUfgAfguuCfaAfgUfgAfcsAfsu | 0.054 | 0.503 | 0.456 |
| D2081 | S2081 | CfuCfcUfaGfaAfGfAfaAfaAfaUfuCfuAf | A2081 | uAfgAfaUfuUfuUfucuUfcUfaGfgAfgsGfsc | 0.050 | 0.596 | 0.531 |
| D2082 | S2082 | AfuUfuAfgAfaGfAfGfcAfaCfuAfaCfuAf | A2082 | uAfgUfuAfgUfuGfcucUfuCfuAfaAfusAfsu | 0.064 | 0.806 | 0.928 |
| D2083 | S2083 | CfuAfaCfuAfaCfUfUfaAfuUfcAfaAfaUf | A2083 | aUfuUfuGfaAfuUfaagUfuAfgUfuAfgsUfsu | 0.056 | 0.844 | 0.761 |
| D2084 | S2084 | CfaGfcAfuAfgUfCfAfaAfuAfaAfaGfaAf | A2084 | uUfcUfuUfuAfuUfugaCfuAfuGfcUfgsUfsu | 0.046 | 0.859 | 0.756 |
| D2085 | S2085 | GfaAfaUfaAfgAfAfAfuGfuAfaAfaCfaUf | A2085 | aUfgUfuUfuAfcAfuuuCfuUfaUfuUfcsAfsu | 0.039 | 0.615 | 0.612 |
| D2086 | S2086 | UfcAfcUfuGfaAfCfUfcAfaCfuCfaAfaAf | A2086 | uUfuUfgAfgUfuGfaguUfcAfaGfuGfasCfsa | 0.057 | 0.724 | 0.663 |
| D2087 | S2087 | UfcUfaCfuUfcAfAfCfaAfaAfaGfuGfaAf | A2087 | uUfcAfcUfuUfuUfguuGfaAfgUfaGfasAfsu | 0.732 | 1.028 | 0.915 |
| D2088 | S2088 | UfuUfaGfaAfgAfGfCfaAfcUfaAfcUfaAf | A2088 | uUfaGfuUfaGfuUfgcuCfuUfcUfaAfasUfsa | 0.061 | 0.795 | 0.785 |
| D2089 | S2089 | AfaAfaCfaAfgAfUfAfaUfaGfcAfuCfaAf | A2089 | uUfgAfuGfcUfaUfuauCfuUfgUfuUfusUfsc | 0.330 | 1.017 | 0.865 |
| D2090 | S2090 | AfgCfaUfaGfuCfAfAfaUfaAfaAfgAfaAf | A2090 | uUfuCfuUfuUfaUfuugAfcUfaUfgCfusGfsu | 0.038 | 0.606 | 0.589 |
| D2091 | S2091 | AfgAfcCfcAfgCfAfAfcUfcUfcAfaGfuUf | A2091 | aAfcUfuGfaGfaGfuugCfuGfgGfuCfusGfsa | 0.301 | 0.850 | 0.753 |
| D2092 | S2092 | AfgUfcCfaUfgGfAfCfaUfuAfaUfuCfaAf | A2092 | uUfgAfaUfuAfaUfgucCfaUfgGfaCfusAfsc | 0.407 | 0.791 | 0.726 |
| D2093 | S2093 | GfaUfgGfaUfcAfCfAfaAfaCfuUfcAfaUf | A2093 | aUfuGfaAfgUfuUfuguGfaUfcCfaUfcsUfsa | 0.120 | 0.658 | 0.654 |
| D2094 | S2094 | CfuAfgAfgAfaGfAfUfaUfaCfuCfcAfuAf | A2094 | uAfuGfgAfgUfaUfaucUfuCfuCfuAfgsGfsc | 0.071 | 0.610 | 0.645 |
| D2095 | S2095 | AfaAfgAfcAfaCfAfAfaCfaUfuAfuAfuUf | A2095 | aAfuAfuAfaUfgUfuugUfuGfuCfuUfusCfsc | 0.029 | 0.306 | 0.461 |
| D2096 | S2096 | CfaUfuAfuAfuUfGfAfaUfaUfuCfuUfuUf | A2096 | aAfaAfgAfaUfaUfucaAfuAfuAfaUfgsUfsu | 0.031 | 0.510 | 0.595 |
| D2097 | S2097 | GfaCfcCfaGfcAfAfCfuCfuCfaAfgUfuUf | A2097 | aAfaCfuUfgAfgAfguuGfcUfgGfgUfcsUfsg | 0.075 | 0.697 | 0.845 |
| D2098 | S2098 | GfgAfuCfaCfaAfAfAfcUfuCfaAfuGfaAf | A2098 | uUfcAfuUfgAfaGfuuuUfgUfgAfuCfcsAfsu | 0.130 | 0.831 | 0.951 |
| D2099 | S2099 | GfaAfgAfuAfuAfCfUfcCfaUfaGfuGfaAf | A2099 | uUfcAfcUfaUfgGfaguAfuAfuCfuUfcsUfsc | 0.058 | 0.828 | 0.938 |
| D2100 | S2100 | GfaCfaAfcAfaAfCfAfuUfaUfaUfuGfaAf | A2100 | uUfcAfaUfaUfaAfuguUfuGfuUfgUfcsUfsu | 0.026 | 0.564 | 0.856 |
| D2101 | S2101 | GfgGfaAfaUfcAfCfGfaAfaCfcAfaCfuAf | A2101 | uAfgUfuGfgUfuUfcguGfaUfuUfcCfcsAfsa | 0.314 | 0.948 | 1.033 |
| D2102 | S2102 | AfcCfcAfgCfaAfCfUfcUfcAfaGfuUfuUf | A2102 | aAfaAfcUfuGfaGfaguUfgCfuGfgGfusCfsu | 0.033 | 0.448 | 0.675 |
| D2103 | S2103 | GfgAfcAfuUfaAfUfUfcAfaCfaUfcGfaAf | A2103 | uUfcGfaUfgUfuGfaauUfaAfuGfuCfcsAfsu | 0.156 | 0.897 | 0.912 |
| D2104 | S2104 | GfaUfcAfcAfaAfAfCfuUfcAfaUfgAfaAf | A2104 | uUfuCfaUfuGfaAfguuUfuGfuGfaUfcsCfsa | 0.056 | 0.619 | 0.769 |
| D2105 | S2105 | AfcUfcCfaUfaGfUfGfaAfgCfaAfuCfuAf | A2105 | uAfgAfuUfgCfuUfcacUfaUfgGfaGfusAfsu | 0.100 | 0.823 | 0.925 |
| D2106 | S2106 | AfcAfaCfaAfaCfAfUfuAfuAfuUfgAfaUf | A2106 | aUfuCfaAfuAfuAfaugUfuUfgUfuGfusCfsu | 0.035 | 0.565 | 0.843 |
| D2107 | S2107 | GfgAfaAfuCfaCfGfAfaAfcCfaAfcUfaUf | A2107 | aUfaGfuUfgGfuUfucgUfgAfuUfuCfcsCfsa | 0.076 | 0.701 | 0.890 |
| D2108 | S2108 | CfcCfaGfcAfaCfUfCfuCfaAfgUfuUfuUf | A2108 | aAfaAfaCfuUfgAfgagUfuGfcUfgGfgsUfsc | 0.057 | 0.626 | 0.884 |
| D2109 | S2109 | GfaCfaUfuAfaUfUfCfaAfcAfuCfgAfaUf | A2109 | aUfuCfgAfuGfuUfgaaUfuAfaUfgUfcsCfsa | 0.160 | 0.873 | 1.012 |
| D2110 | S2110 | AfaCfgUfgGfgAfGfAfaCfuAfcAfaAfuAf | A2110 | uAfuUfuGfuAfgUfucuCfcCfaCfgUfusUfsc | 0.101 | 0.881 | 0.981 |
| D2111 | S2111 | CfuCfcAfuAfgUfGfAfaGfcAfaUfcUfaAf | A2111 | uUfaGfaUfuGfcUfucaCfuAfuGfgAfgsUfsa | 0.026 | 0.435 | 0.691 |
| D2112 | S2112 | CfaAfcAfaAfcAfUfUfaUfaUfuGfaAfuAf | A2112 | uAfuUfcAfaUfaUfaauGfuUfuGfuUfgsUfsc | 0.154 | 0.882 | 1.091 |
| D2113 | S2113 | GfaAfaUfcAfcGfAfAfaCfcAfaCfuAfuAf | A2113 | uAfuAfgUfuGfgUfuucGfuGfaUfuUfcsCfsc | 0.045 | 0.764 | 1.004 |
| D2114 | S2114 | CfuCfuCfaAfgUfUfUfuUfcAfuGfuCfuAf | A2114 | uAfgAfcAfuGfaAfaaaCfuUfgAfgAfgsUfsu | 0.105 | 0.925 | 0.988 |
| D2115 | S2115 | AfcAfuUfaAfuUfCfAfaCfaUfcGfaAfuAf | A2115 | uAfuUfcGfaUfgUfugaAfuUfaAfuGfusCfsc | 0.114 | 0.919 | 0.905 |
| D2116 | S2116 | GfgGfaGfaAfcUfAfCfaAfaUfaUfgGfuUf | A2116 | aAfcCfaUfaUfuUfguaGfuUfcUfcCfcsAfsc | 0.234 | 1.023 | 0.951 |
| D2117 | S2117 | UfcCfaUfaGfuGfAfAfgCfaAfuCfuAfaUf | A2117 | aUfuAfgAfuUfgCfuucAfcUfaUfgGfasGfsu | 0.033 | 0.566 | 0.778 |
| D2118 | S2118 | AfaCfaAfaCfaUfUfAfuAfuUfgAfaUfaUf | A2118 | aUfaUfuCfaAfuAfuaaUfgUfuUfgUfusGfsu | 0.031 | 0.535 | 0.785 |
| D2119 | S2119 | UfgGfcAfaUfgUfCfCfcCfaAfuGfcAfaUf | A2119 | aUfuGfcAfuUfgGfggaCfaUfuGfcCfasGfsu | 0.065 | 0.815 | 0.967 |
| D2120 | S2120 | UfcAfgGfuAfgUfCfCfaUfgGfaCfaUfuAf | A2120 | uAfaUfgUfcCfaUfggaCfuAfcCfuGfasUfsa | 0.223 | 0.825 | 0.924 |
| D2121 | S2121 | UfuAfaUfuCfaAfCfAfuCfgAfaUfaGfaUf | A2121 | aUfcUfaUfuCfgAfuguUfgAfaUfuAfasUfsg | 0.083 | 0.781 | 0.915 |
| D2122 | S2122 | GfgAfgAfaCfuAfCfAfaAfuAfuGfgUfuUf | A2122 | aAfaCfcAfuAfuUfuguAfgUfuCfuCfcsCfsa | 0.079 | 0.680 | 0.767 |
| D2123 | S2123 | CfcAfuAfgUfgAfAfGfcAfaUfcUfaAfuUf | A2123 | aAfuUfaGfaUfuGfcuuCfaCfuAfuGfgsAfsg | 0.026 | 0.537 | 0.793 |
| D2124 | S2124 | AfcAfaAfcAfuUfAfUfaUfuGfaAfuAfuUf | A2124 | aAfuAfuUfcAfaUfauaAfuGfuUfuGfusUfsg | 0.044 | 0.680 | 0.828 |
| D2125 | S2125 | AfaUfgCfaAfuCfCfCfgGfaAfaAfcAfaAf | A2125 | uUfuGfuUfuUfcCfgggAfuUfgCfaUfusGfsg | 0.349 | 0.971 | 1.005 |
| D2126 | S2126 | CfaGfgUfaGfuCfCfAfuGfgAfcAfuUfaAf | A2126 | uUfaAfuGfuCfcAfuggAfcUfaCfcUfgsAfsu | 0.070 | 0.548 | 0.546 |
| D2127 | S2127 | UfuCfaAfcAfuCfGfAfaUfaGfaUfgGfaUf | A2127 | aUfcCfaUfcUfaUfucgAfuGfuUfgAfasUfsu | 0.225 | 0.958 | 0.967 |
| D2128 | S2128 | GfuUfgGfgCfcUfAfGfaGfaAfgAfuAfuAf | A2128 | uAfuAfuCfuUfcUfcuaGfgCfcCfaAfcsCfsa | 0.765 | 0.969 | 0.922 |
| D2129 | S2129 | CfaUfaGfuGfaAfGfCfaAfuCfuAfaUfuAf | A2129 | uAfaUfuAfgAfuUfgcuUfcAfcUfaUfgsGfsa | 0.028 | 0.583 | 0.777 |
| D2130 | S2130 | AfaCfaUfuAfuAfUfUfgAfaUfaUfuCfuUf | A2130 | aAfgAfaUfaUfuCfaauAfuAfaUfgUfusUfsg | 0.249 | 0.916 | 0.981 |
| D2131 | S2131 | GfcAfaUfcCfcGfGfAfaAfaCfaAfaGfaUf | A2131 | aUfcUfuUfgUfuUfuccGfgGfaUfuGfcsAfsu | 0.435 | 1.002 | 1.019 |
| D2132 | S2132 | GfgUfaGfuCfcAfUfGfgAfcAfuUfaAfuUf | A2132 | aAfuUfaAfuGfuCfcauGfgAfcUfaCfcsUfsg | 0.427 | 0.988 | 0.918 |
| D2133 | S2133 | AfuCfgAfaUfaGfAfUfgGfaUfcAfcAfaAf | A2133 | uUfuGfuGfaUfcCfaucUfaUfuCfgAfusGfsu | 0.170 | 0.706 | 0.890 |
| D2134 | S2134 | CfcUfaGfaGfaAfGfAfuAfuAfcUfcCfaUf | A2134 | aUfgGfaGfuAfuAfucuUfcUfcUfaGfgsCfsc | 0.033 | 0.543 | 0.733 |
| D2135 | S2135 | GfuUfgGfaAfgAfCfUfgGfaAfaGfaCfaAf | A2135 | uUfgUfcUfuUfcCfaguCfuUfcCfaAfcsUfsc | 0.137 | 0.975 | 0.944 |
| D2136 | S2136 | AfcAfuUfaUfaUfUfGfaAfuAfuUfcUfuUf | A2136 | aAfaGfaAfuAfuUfcaaUfaUfaAfuGfusUfsu | 0.114 | 0.882 | 0.940 |
| D2137 | S2137 | CfaAfuCfcCfgGfAfAfaAfcAfaAfgAfuUf | A2137 | aAfuCfuUfuGfuUfuucCfgGfgAfuUfgsCfsa | 0.155 | 0.755 | 0.686 |
| D2138 | S2138 | CfuAfcUfuGfgGfAfUfcAfcAfaAfgCfaAf | A2138 | uUfgCfuUfuGfuGfaucCfcAfaGfuAfgsAfsa | 0.196 | 0.825 | 0.658 |
| D2139 | S2139 | AfcAfaCfcUfaAfAfUfgGfuAfaAfuAfuAf | A2139 | uAfuAfuUfuAfcCfauuUfaGfgUfuGfusUfsu | 0.133 | 0.704 | 0.671 |
| D2140 | S2140 | AfuCfcAfuCfcAfAfCfaGfaUfuCfaGfaAf | A2140 | uUfcUfgAfaUfcUfguuGfgAfuGfgAfusCfsa | 0.184 | 0.775 | 0.658 |
| D2141 | S2141 | AfaCfuGfaGfgCfAfAfaUfuUfaAfaAfgAf | A2141 | uCfuUfuUfaAfaUfuugCfcUfcAfgUfusCfsa | 0.076 | 0.682 | 0.777 |
| D2142 | S2142 | AfgAfgUfaUfgUfGfUfaAfaAfaUfcUfgUf | A2142 | aCfaGfaUfuUfuUfacaCfaUfaCfuCfusGfsu | 0.448 | 0.659 | 0.761 |
| D2143 | S2143 | AfaUfcCfcGfgAfAfAfaCfaAfaGfaUfuUf | A2143 | aAfaUfcUfuUfgUfuuuCfcGfgGfaUfusGfsc | 0.097 | 0.844 | 0.924 |
| D2144 | S2144 | UfaCfuUfgGfgAfUfCfaCfaAfaGfcAfaAf | A2144 | uUfuGfcUfuUfgUfgauCfcCfaAfgUfasGfsa | 0.084 | 0.875 | 0.947 |
| D2145 | S2145 | CfaAfcCfuAfaAfUfGfgUfaAfaUfaUfaAf | A2145 | uUfaUfaUfuUfaCfcauUfuAfgGfuUfgsUfsu | 0.104 | 0.811 | 0.814 |
| D2146 | S2146 | UfuGfaAfuGfaAfCfUfgAfgGfcAfaAfuUf | A2146 | aAfuUfuGfcCfuCfaguUfcAfuUfcAfasAfsg | 0.046 | 0.549 | 0.680 |
| D2147 | S2147 | AfcUfgAfgGfcAfAfAfuUfuAfaAfaGfgAf | A2147 | uCfcUfuUfuAfaAfuuuGfcCfuCfaGfusUfsc | 0.079 | 0.890 | 1.005 |
| D2148 | S2148 | GfaGfuAfuGfuGfUfAfaAfaAfuCfuGfuAf | A2148 | uAfcAfgAfuUfuUfuacAfcAfuAfcUfcsUfsg | 0.497 | 0.676 | 0.783 |
| D2149 | S2149 | AfcUfuGfgGfaUfCfAfcAfaAfgCfaAfaAf | A2149 | uUfuUfgCfuUfuGfugaUfcCfcAfaGfusAfsg | 0.049 | 0.699 | 0.907 |
| D2150 | S2150 | AfuGfgUfaAfaUfAfUfaAfcAfaAfcCfaAf | A2150 | uUfgGfuUfuGfuUfauaUfuUfaCfcAfusUfsu | 0.093 | 0.928 | 0.941 |
| D2151 | S2151 | UfgAfaUfgAfaCfUfGfaGfgCfaAfaUfuUf | A2151 | aAfaUfuUfgCfcUfcagUfuCfaUfuCfasAfsa | 0.201 | 0.736 | 0.885 |
| D2152 | S2152 | CfuGfaGfgCfaAfAfUfuUfaAfaAfgGfcAf | A2152 | uGfcCfuUfuUfaAfauuUfgCfcUfcAfgsUfsu | 0.071 | 0.938 | 0.872 |
| D2153 | S2153 | AfgUfaUfgUfgUfAfAfaAfaUfcUfgUfaAf | A2153 | uUfaCfaGfaUfuUfuuaCfaCfaUfaCfusCfsu | 0.504 | 0.816 | 0.689 |
| D2154 | S2154 | GfaAfaAfcAfaAfGfAfuUfuGfgUfgUfuUf | A2154 | aAfaCfaCfcAfaAfucuUfuGfuUfuUfcsCfsg | 0.061 | 0.723 | 0.922 |
| D2155 | S2155 | AfgUfgUfgGfaGfAfAfaAfcAfaCfcUfaAf | A2155 | uUfaGfgUfuGfuUfuucUfcCfaCfaCfusCfsa | 0.071 | 0.689 | 0.869 |
| D2156 | S2156 | GfuCfuCfaAfaAfUfGfgAfaGfgUfuAfuAf | A2156 | uAfuAfaCfcUfuCfcauUfuUfgAfgAfcsUfsu | 0.133 | 0.643 | 0.974 |
| D2157 | S2157 | GfaAfuGfaAfcUfGfAfgGfcAfaAfuUfuAf | A2157 | uAfaAfuUfuGfcCfucaGfuUfcAfuUfcsAfsa | 0.204 | 0.751 | 1.008 |
| D2158 | S2158 | UfgAfgGfcAfaAfUfUfuAfaAfaGfgCfaAf | A2158 | uUfgCfcUfuUfuAfaauUfuGfcCfuCfasGfsu | 0.089 | 0.820 | 0.937 |
| D2159 | S2159 | GfuAfuGfuGfuAfAfAfaAfuCfuGfuAfaUf | A2159 | aUfuAfcAfgAfuUfuuuAfcAfcAfuAfcsUfsc | 0.535 | 0.697 | 0.788 |
| D2160 | S2160 | AfaAfaCfaAfaGfAfUfuUfgGfuGfuUfuUf | A2160 | aAfaAfcAfcCfaAfaucUfuUfgUfuUfusCfsc | 0.297 | 0.954 | 1.004 |
| D2161 | S2161 | GfuGfuGfgAfgAfAfAfaCfaAfcCfuAfaAf | A2161 | uUfuAfgGfuUfgUfuuuCfuCfcAfcAfcsUfsc | 0.178 | 0.872 | 0.918 |
| D2162 | S2162 | AfuGfgAfaGfgUfUfAfuAfcUfcUfaUfaAf | A2162 | uUfaUfaGfaGfuAfuaaCfcUfuCfcAfusUfsu | 0.026 | 0.489 | 0.890 |
| D2163 | S2163 | AfaUfgAfaCfuGfAfGfgCfaAfaUfuUfaAf | A2163 | uUfaAfaUfuUfgCfcucAfgUfuCfaUfusCfsa | 0.111 | 0.789 | 0.859 |
| D2164 | S2164 | GfaGfgCfaAfaUfUfUfaAfaAfgGfcAfaUf | A2164 | aUfuGfcCfuUfuUfaaaUfuUfgCfcUfcsAfsg | 0.241 | 0.956 | 0.869 |
| D2165 | S2165 | UfaUfgUfgUfaAfAfAfaUfcUfgUfaAfuAf | A2165 | uAfuUfaCfaGfaUfuuuUfaCfaCfaUfasCfsu | 0.571 | 0.762 | 0.931 |
| D2166 | S2166 | AfcAfaAfgAfuUfUfGfgUfgUfuUfuCfuAf | A2166 | uAfgAfaAfaCfaCfcaaAfuCfuUfuGfusUfsu | 0.106 | 0.981 | 0.924 |
| D2167 | S2167 | UfgUfgGfaGfaAfAfAfcAfaCfcUfaAfaUf | A2167 | aUfuUfaGfgUfuGfuuuUfcUfcCfaCfasCfsu | 0.064 | 0.765 | 0.902 |
| D2168 | S2168 | UfgGfaAfgGfuUfAfUfaCfuCfuAfuAfaAf | A2168 | uUfuAfuAfgAfgUfauaAfcCfuUfcCfasUfsu | 0.029 | 0.675 | 0.859 |
| D2169 | S2169 | AfuGfaAfcUfgAfGfGfcAfaAfuUfuAfaAf | A2169 | uUfuAfaAfuUfuGfccuCfaGfuUfcAfusUfsc | 0.054 | 0.733 | 0.843 |
| D2170 | S2170 | AfgGfcAfaAfuUfUfAfaAfaGfgCfaAfuAf | A2170 | uAfuUfgCfcUfuUfuaaAfuUfuGfcCfusCfsa | 0.075 | 0.754 | 0.881 |
| D2171 | S2171 | AfaGfaUfuUfgGfUfGfuUfuUfcUfaCfuUf | A2171 | aAfgUfaGfaAfaAfcacCfaAfaUfcUfusUfsg | 0.303 | 1.065 | 0.977 |
| D2172 | S2172 | AfaAfcAfaCfcUfAfAfaUfgGfuAfaAfuAf | A2172 | uAfuUfuAfcCfaUfuuaGfgUfuGfuUfusUfsc | 0.101 | 0.855 | 0.880 |
| D2173 | S2173 | AfuAfcUfcUfaUfAfAfaAfuCfaAfcCfaAf | A2173 | uUfgGfuUfgAfuUfuuaUfaGfaGfuAfusAfsa | 0.107 | 0.961 | 0.960 |
| D2174 | S2174 | UfgAfaCfuGfaGfGfCfaAfaUfuUfaAfaAf | A2174 | uUfuUfaAfaUfuUfgccUfcAfgUfuCfasUfsu | 0.078 | 0.714 | 0.878 |
| D2175 | S2175 | GfgCfaAfaUfuUfAfAfaAfgGfcAfaUfaAf | A2175 | uUfaUfuGfcCfuUfuuaAfaUfuUfgCfcsUfsc | 0.054 | 0.767 | 0.918 |
| D2176 | S2176 | UfuUfuCfuAfcUfUfGfgGfaUfcAfcAfaAf | A2176 | uUfuGfuGfaUfcCfcaaGfuAfgAfaAfasCfsa | 0.915 | 1.030 | 0.916 |
| D2177 | S2177 | AfaCfaAfcCfuAfAfAfuGfgUfaAfaUfaUf | A2177 | aUfaUfuUfaCfcAfuuuAfgGfuUfgUfusUfsu | 0.042 | 0.260 | 0.448 |
| D2178 | S2178 | UfaCfuCfuAfuAfAfAfaUfcAfaCfcAfaAf | A2178 | uUfuGfgUfuGfaUfuuuAfuAfgAfgUfasUfsa | 0.063 | 0.897 | 0.869 |
| D2179 | S2179 | GfaAfcUfgAfgGfCfAfaAfuUfuAfaAfaAf | A2179 | uUfuUfuAfaAfuUfugcCfuCfaGfuUfcsAfsu | 0.178 | 0.858 | 0.869 |
| D2180 | S2180 | CfaGfaGfuAfuGfUfGfuAfaAfaAfuCfuUf | A2180 | aAfgAfuUfuUfuAfcacAfuAfcUfcUfgsUfsg | 0.436 | 0.677 | 0.813 |

### Example 4: In Vitro Silencing Activity With Various Chemical Modifications on ANGPTL3 siRNA

### Cell Culture and Transfections

[0332] Hep3B cells (ATCC, Manassas, VA) were grown to near confluence at 37° C. in an atmosphere of 5% CO₂ in RPMI (ATCC) supplemented with 10% FBS, streptomycin, and glutamine (ATCC) before being released from the plate by trypsinization. Transfection was carried out by adding 14.8 μl of Opti-MEM plus 0.2 μl of Lipofectamine RNAiMax per well (Invitrogen, Carlsbad CA. cat #13778-150) to 5 μl of siRNA duplexes per well into a 96-well plate and incubated at room temperature for 15 minutes. 80 μl of complete growth media without antibiotic containing ˜2×10⁴ Hep3B cells were then added to the siRNA mixture. Cells were incubated for either 24 or 120 hours prior to RNA purification. Single dose experiments were performed at 10 nM and 0.1 nM final duplex concentration and dose response experiments were done at 10, 1, 0.5, 0.1,0.05, 0.01, 0.005, 0.001, 0.0005, 0.0001, 0.00005 and 0.00001 nM final duplex concentration unless otherwise stated.

### cDNA Synthesis Using ABI High Capacity cDNA Reverse Transcription Kit (Applied Biosystems, Foster City, CA, Cat #4368813)

[0333] A master mix of 2 μl 10× Buffer, 0.8 μl 25× dNTPs, 2 μl Random primers, 1 μl Reverse Transcriptase, 1 μl RNase inhibitor and 3.2 μl of H₂O per reaction were added into 10 μl total RNA. cDNA was generated using a Bio-Rad C-1000 or S-1000 thermal cycler (Hercules, CA) through the following steps: 25° C. 10 min, 37° C. 120 min, 85° C. 5 sec, 4° C. hold.

### Real Time PCR

[0334] 2 μl of cDNA was added to a master mix containing 0.5 μl GAPDH TaqMan Probe (Applied Biosystems Cat #4326317E), 0.5 μl ANGPTL TaqMan probe (Applied Biosystems cat #Hs00205581_m1) and 5 μl Lightcycler 480 probe master mix (Roche Cat #04887301001) per well in a 384 well 50 plates (Roche cat #04887301001). Real time PCR was done in an ABI 7900HT Real Time PCR system (Applied Biosystems) using the ΔΔCt(RQ) assay. Each duplex was tested in two independent transfections, and each transfection was assayed in duplicate, unless otherwise noted in the summary tables.

[0335] To calculate relative fold change, real time data was analyzed using the ΔΔCt method and normalized to assays performed with cells transfected with 10 nM AD-1955, or mock transfected cells. IC₅₀s were calculated using a 4 parameter fit model using XLFit and normalized to cells transfected with AD-1955 or naïve cells over the same dose range, or to its own lowest dose. AD-1955 sequence, used as a negative control, targets luciferase and has the following sequence:

| (SEQ ID NO: 1207) | |
|---|---|
| sense: | cuuAcGcuGAGuAcuucGAdTsdT; |
| (SEQ ID NO: 1208) | |
| antisense: | UCGAAGuACUcAGCGuAAGdTsdT. |

[0336] The various embodiments described above can be combined to provide further embodiments. All of the U.S. patents, U.S. patent application publications, foreign patents, foreign patent applications and non-patent publications referred to in this specification are incorporated herein by reference, in their entirety. Aspects of the embodiments can be modified, if necessary to employ concepts of the various patents, applications and publications to provide yet further embodiments.

[0337] These and other changes can be made to the embodiments in light of the above-detailed description. In general, in the following claims, the terms used should not be construed to limit the claims to the specific embodiments disclosed in the specification and the claims, but should be construed to include all possible embodiments along with the full scope of equivalents to which such claims are entitled. Accordingly, the claims are not limited by the disclosure.

We claim:

1. A double-stranded RNAi agent capable of inhibiting the expression of a target gene, comprising a sense strand and an antisense strand that is complementary to at least one portion of a mRNA corresponding to the target gene, each strand having 17 to 30 nucleotides and forming a duplex region that is 17-23 base pairs in length, wherein the antisense strand is represented by the formula (II):
3′ nₚ′-Nₐ′-(X′X′X′)ₖ-N_{b}′-Y′Y′Y′-N_{b}′-(Z′Z′Z′)ₗ-Nₐ′-n_{q}′ 5′ (II)
wherein:
k and l are each independently 0 or 1;
each Nₐ′ independently represents an oligonucleotide sequence comprising 2-25 modified nucleotides, each sequence comprising at least two differently modified nucleotides;
each N_{b}′ independently represents an oligonucleotide sequence comprising 1-10 nucleotides which are either modified or unmodified or combinations thereof;
nₚ′ represents an overhang nucleotide sequence comprising 0-6 optionally modified nucleotides;
n_{q}′ is 0; and
X′X′X′, Y′Y′Y′, and Z′Z′Z′ each independently represent one motif of three identical modifications on three consecutive nucleotides; and
wherein
(a) the modification of each nucleotide next to a X′X′X′, Y′Y′Y′, or Z′Z′Z′ motif is different than the modification of the motif that the nucleotide is next to;
(b) the Y′ is modified with 2′-OCH₃; and
(c) the Y′Y′Y′ motif occurs at position 9, 10, 11; 10, 11, 12; 11, 12, 13; 12, 13, 14; or 13, 14, 15 of the antisense strand, counting from the first nucleotide at the 5′ end of the antisense strand, or counting from the first paired nucleotide within the duplex region at the 5′ end the antisense strand.

2. The double-stranded RNAi agent of claim 1, wherein the Y′Y′Y′ motif occurs at position 11, 12, 13 of the antisense strand, counting from the first nucleotide at the 5′ end of the antisense strand, or counting from the first paired nucleotide within the duplex region at the 5′ end the antisense strand.

3. The double-stranded RNAi agent of claim 2, wherein k is 1; l is 1; or both k and l are 1.

4. The double-stranded RNAi agent of claim 2, wherein nₚ′ is 2 and the overhang region contains a phosphorothioate internucleotide linkage between the two nucleotide.

5. The double-stranded RNAi agent of claim 4, wherein the antisense strand comprises phosphorothioate internucleotide linkages between the three 3′-terminal nucleotides, in which two of the three nucleotides are the overhang nucleotides, and the third is the paired nucleotide next to the overhang nucleotide.

6. The double-stranded RNAi agent of claim 2, wherein each N_{b}′ independently represents an oligonucleotide sequence comprising 1-5 modified nucleotides.

7. The double-stranded RNAi agent of claim 2, wherein the duplex region is 19-21 nucleotide pairs in length.

8. The double-stranded RNAi agent of claim 2, wherein the modifications on the nucleotides are selected from the group consisting of LNA, HNA, CeNA, 2′-methoxyethyl, 2′-O-alkyl, 2′-O-allyl, 2′-C-allyl, 2′-fluoro, 2′-deoxy, and combinations thereof.

9. The double-stranded RNAi agent of claim 8, wherein the nucleotide are modified with either 2′-OCH₃ or 2′-F.

10. The double-stranded RNAi agent of claim 2, further comprising at least one ligand.

11. The double-stranded RNAi agent of claim 10, wherein the at least one ligand is conjugated to the sense strand.

12. The double-stranded RNAi agent of claim 10, wherein the at least one ligand is a one or more GalNAc derivatives attached through a bivalent or trivalent branched linker.

13. The double-stranded RNAi agent of claim 12, wherein the at least one ligand is

[chemical structure]

14. The double-stranded RNAi agent of claim 11, wherein the at least one ligand is attached to the 3′ end of the sense strand.

15. The double-stranded RNAi agent of claim 2, further comprising at least one phosphorothioate or methylphosphonate internucleotide linkage.

16. The double-stranded RNAi agent of claim 2, wherein the base pair at the 1 position of the 5′-end of the duplex is an AU base pair.

17. The double-stranded RNAi agent of claim 2, wherein Nₐ′ and/or N_{b}′ comprise modifications of alternating pattern.

18. The double-stranded RNAi agent of claim 10, wherein the at least one ligand is an endosomolytic ligand.

19. The double-stranded RNAi agent of claim 10, wherein the at least one ligand is a protein, a carbohydrate, or a lipid.

20. The double-stranded RNAi agent of claim 10, wherein the at least one ligand is an antibody.

21. A pharmaceutical composition comprising the double-stranded RNAi agent of claim 1 and a pharmaceutically acceptable carrier or excipient.

22. A method for inhibiting the expression of a target gene comprising:
administering the double-stranded RNAi agent of claim 1 in an amount sufficient to inhibit expression of the target gene.

23. The method of claim 22, wherein the double-stranded RNAi agent is administered through subcutaneous or intravenous administration.

24. A method for delivering a polynucleotide to a specific target in a subject comprising:
administering the double-stranded RNAi agent of claim 1, wherein the administering is intramuscular, intrabronchial, intrapleural, intraperitoneal, intraarterial, lymphatic, intravenous, subcutaneous, or cerebrospinal administration, or combinations thereof.

25. The method of claim 24, wherein the administering is through subcutaneous injection.

The application's sequence listing, which the Patent Office published only in electronic form, follows.

SEQUENCE LISTING (1208 sequences)

SEQ ID NO: 1 - protein, 16 aa, unidentified
  REGION 1..16: note = Description of Unknown: Exemplary hydrophobic membrane translocation peptide
AAVALLPAVLLALLAP

SEQ ID NO: 2 - protein, 11 aa, unidentified
  REGION 1..11: note = Description of Unknown: RFGF analogue peptide
AALLPVLLAAP

SEQ ID NO: 3 - protein, 13 aa, Human immunodeficiency virus
GRKKRRQRRRPPQ

SEQ ID NO: 4 - protein, 16 aa, Drosophila sp.
RQIKIWFQNRRMKWKK

SEQ ID NO: 5 - RNA, 21 nt, synthetic construct
  source 1..21: mol_type = other RNA
  modified_base 1: mod_base = OTHER; note = 2'-deoxy-2'-fluoroadenosine-3'-phosphate
  modified_base 2: mod_base = OTHER; note = 2'-O-methyluridine-3'-phosphate
  modified_base 3: mod_base = OTHER; note = 2'-deoxy-2'-fluoroguanosine-3'-phosphate
  modified_base 4: mod_base = OTHER; note = 2'-O-methyluridine-3'-phosphate
  modified_base 5: mod_base = OTHER; note = 2'-deoxy-2'-fluoroadenosine-3'-phosphate
  modified_base 6: mod_base = OTHER; note = 2'-O-methyladenosine-3'-phosphate
  modified_base 7: mod_base = OTHER; note = 2'-deoxy-2'-fluorocytidine-3'-phosphate
  modified_base 8: mod_base = OTHER; note = 2'-O-methylcytidine-3'-phosphate
  modified_base 9: mod_base = OTHER; note = 2'-deoxy-2'-fluoroadenosine-3'-phosphate
  modified_base 10: mod_base = OTHER; note = 2'-deoxy-2'-fluoroadenosine-3'-phosphate
  modified_base 11: mod_base = OTHER; note = 2'-deoxy-2'-fluoroguanosine-3'-phosphate
  modified_base 12: mod_base = OTHER; note = 2'-O-methyladenosine-3'-phosphate
  modified_base 13: mod_base = OTHER; note = 2'-deoxy-2'-fluoroguanosine-3'-phosphate
  modified_base 14: mod_base = OTHER; note = 2'-O-methyluridine-3'-phosphate
  modified_base 15: mod_base = OTHER; note = 2'-deoxy-2'-fluoroadenosine-3'-phosphate
  modified_base 16: mod_base = OTHER; note = 2'-O-methyluridine-3'-phosphate
  modified_base 17: mod_base = OTHER; note = 2'-deoxy-2'-fluorouridine-3'-phosphate
  modified_base 18: mod_base = OTHER; note = 2'-O-methylcytidine-3'-phosphate
  modified_base 19: mod_base = OTHER; note = 2'-deoxy-2'-fluorocytidine-3'-phosphate
  modified_base 20: mod_base = OTHER; note = 2'-O-methyladenosine-3'-phosphorothioate
  modified_base 21: mod_base = OTHER; note = 2'-O-methyluridine
atgtaaccaagagtattccat

SEQ ID NO: 6 - RNA, 21 nt, synthetic construct
  source 1..21: mol_type = other RNA
  modified_base 1: mod_base = OTHER; note = 2'-deoxy-2'-fluoroadenosine-3'-phosphorothioate
  modified_base 2: mod_base = OTHER; note = 2'-O-methyluridine-3'-phosphate
  modified_base 3: mod_base = OTHER; note = 2'-deoxy-2'-fluoroguanosine-3'-phosphate
  modified_base 4: mod_base = OTHER; note = 2'-O-methyluridine-3'-phosphate
  modified_base 5: mod_base = OTHER; note = 2'-deoxy-2'-fluoroadenosine-3'-phosphate
  modified_base 6: mod_base = OTHER; note = 2'-O-methyladenosine-3'-phosphate
  modified_base 7: mod_base = OTHER; note = 2'-deoxy-2'-fluorocytidine-3'-phosphate
  modified_base 8: mod_base = OTHER; note = 2'-O-methylcytidine-3'-phosphate
  modified_base 9: mod_base = OTHER; note = 2'-deoxy-2'-fluoroadenosine-3'-phosphate
  modified_base 10: mod_base = OTHER; note = 2'-deoxy-2'-fluoroadenosine-3'-phosphate
  modified_base 11: mod_base = OTHER; note = 2'-deoxy-2'-fluoroguanosine-3'-phosphate
  modified_base 12: mod_base = OTHER; note = 2'-O-methyladenosine-3'-phosphate
  modified_base 13: mod_base = OTHER; note = 2'-deoxy-2'-fluoroguanosine-3'-phosphate
  modified_base 14: mod_base = OTHER; note = 2'-O-methyluridine-3'-phosphate
  modified_base 15: mod_base = OTHER; note = 2'-deoxy-2'-fluoroadenosine-3'-phosphate
  modified_base 16: mod_base = OTHER; note = 2'-O-methyluridine-3'-phosphate
  modified_base 17: mod_base = OTHER; note = 2'-O-methyluridine-3'-phosphate
  modified_base 18: mod_base = OTHER; note = 2'-O-methylcytidine-3'-phosphate
  modified_base 19: mod_base = OTHER; note = 2'-deoxy-2'-fluorocytidine-3'-phosphate
  modified_base 20: mod_base = OTHER; note = 2'-O-methyladenosine-3'-phosphorothioate
  modified_base 21: mod_base = OTHER; note = 2'-deoxy-2'-fluorouridine
atgtaaccaagagtattccat

SEQ ID NO: 7 - RNA, 21 nt, synthetic construct
  source 1..21: mol_type = other RNA
  modified_base 1: mod_base = OTHER; note = 2'-deoxy-2'-fluoroadenosine-3'-phosphate
  modified_base 2: mod_base = OTHER; note = 2'-O-methyluridine-3'-phosphate
  modified_base 3: mod_base = OTHER; note = 2'-deoxy-2'-fluoroguanosine-3'-phosphate
  modified_base 4: mod_base = OTHER; note = 2'-O-methyluridine-3'-phosphate
  modified_base 5: mod_base = OTHER; note = 2'-deoxy-2'-fluoroadenosine-3'-phosphate
  modified_base 6: mod_base = OTHER; note = 2'-O-methyladenosine-3'-phosphate
  modified_base 7: mod_base = OTHER; note = 2'-deoxy-2'-fluorocytidine-3'-phosphate
  modified_base 8: mod_base = OTHER; note = 2'-O-methylcytidine-3'-phosphate
  modified_base 9: mod_base = OTHER; note = 2'-deoxy-2'-fluoroadenosine-3'-phosphate
  modified_base 10: mod_base = OTHER; note = 2'-deoxy-2'-fluoroadenosine-3'-phosphate
  modified_base 11: mod_base = OTHER; note = 2'-deoxy-2'-fluoroguanosine-3'-phosphate
  modified_base 12: mod_base = OTHER; note = 2'-O-methyladenosine-3'-phosphate
  modified_base 13: mod_base = OTHER; note = 2'-deoxy-2'-fluoroguanosine-3'-phosphate
  modified_base 14: mod_base = OTHER; note = 2'-O-methyluridine-3'-phosphate
  modified_base 15: mod_base = OTHER; note = 2'-deoxy-2'-fluoroadenosine-3'-phosphate
  modified_base 16: mod_base = OTHER; note = 2'-O-methyluridine-3'-phosphate
  modified_base 17: mod_base = OTHER; note = 2'-O-methyluridine-3'-phosphate
  modified_base 18: mod_base = OTHER; note = 2'-O-methylcytidine-3'-phosphate
  modified_base 19: mod_base = OTHER; note = 2'-deoxy-2'-fluorocytidine-3'-phosphate
  modified_base 20: mod_base = OTHER; note = 2'-O-methyladenosine-3'-phosphorothioate
  modified_base 21: mod_base = OTHER; note = 2'-deoxy-2'-fluorouridine
atgtaaccaagagtattccat

SEQ ID NO: 8 - RNA, 21 nt, synthetic construct
  source 1..21: mol_type = other RNA
  modified_base 1: mod_base = OTHER; note = 2'-deoxy-2'-fluoroadenosine-3'-phosphate
  modified_base 2: mod_base = OTHER; note = 2'-O-methyluridine-3'-phosphate
  modified_base 3: mod_base = OTHER; note = 2'-deoxy-2'-fluoroguanosine-3'-phosphate
  modified_base 4: mod_base = OTHER; note = 2'-O-methyluridine-3'-phosphate
  modified_base 5: mod_base = OTHER; note = 2'-deoxy-2'-fluoroadenosine-3'-phosphate
  modified_base 6: mod_base = OTHER; note = 2'-O-methyladenosine-3'-phosphate
  modified_base 7: mod_base = OTHER; note = 2'-deoxy-2'-fluorocytidine-3'-phosphate
  modified_base 8: mod_base = OTHER; note = 2'-O-methylcytidine-3'-phosphate
  modified_base 9: mod_base = OTHER; note = 2'-deoxy-2'-fluoroadenosine-3'-phosphate
  modified_base 10: mod_base = OTHER; note = 2'-deoxy-2'-fluoroadenosine-3'-phosphate
  modified_base 11: mod_base = OTHER; note = 2'-deoxy-2'-fluoroguanosine-3'-phosphate
  modified_base 12: mod_base = OTHER; note = 2'-O-methyladenosine-3'-phosphate
  modified_base 13: mod_base = OTHER; note = 2'-deoxy-2'-fluoroguanosine-3'-phosphate
  modified_base 14: mod_base = OTHER; note = 2'-O-methyluridine-3'-phosphate
  modified_base 15: mod_base = OTHER; note = 2'-deoxy-2'-fluoroadenosine-3'-phosphate
  modified_base 16: mod_base = OTHER; note = 2'-O-methyluridine-3'-phosphate
  modified_base 17: mod_base = OTHER; note = 2'-O-methyluridine-3'-phosphate
  modified_base 18: mod_base = OTHER; note = 2'-O-methylcytidine-3'-phosphate
  modified_base 19: mod_base = OTHER; note = 2'-deoxy-2'-fluorocytidine-3'-phosphate
  modified_base 20: mod_base = OTHER; note = 2'-O-methyladenosine-3'-phosphorothioate
  modified_base 21: mod_base = OTHER; note = 2'-deoxy-2'-fluorouridine
atgtaaccaagagtattccat

SEQ ID NO: 9 - RNA, 21 nt, synthetic construct
  source 1..21: mol_type = other RNA
  modified_base 1: mod_base = OTHER; note = 2'-O-methyladenosine-3'-phosphate
  modified_base 4: mod_base = OTHER; note = 2'-O-methyluridine-3'-phosphate
  modified_base 5: mod_base = OTHER; note = 2'-O-methyladenosine-3'-phosphate
  modified_base 8: mod_base = OTHER; note = 2'-O-methylcytidine-3'-phosphate
  modified_base 9: mod_base = OTHER; note = 2'-O-methylcytidine-3'-phosphate
  modified_base 12: mod_base = OTHER; note = 2'-O-methyladenosine-3'-phosphate
  modified_base 13: mod_base = OTHER; note = 2'-O-methylguanosine-3'-phosphate
  modified_base 16: mod_base = OTHER; note = 2'-O-methyluridine-3'-phosphate
  modified_base 17: mod_base = OTHER; note = 2'-O-methyluridine-3'-phosphate
  modified_base 20: mod_base = OTHER; note = 2'-O-methyladenosine-3'-phosphorothioate
  modified_base 21: mod_base = OTHER; note = 2'-O-methyluridine
atgtaacccagagtattccat

SEQ ID NO: 10 - RNA, 21 nt, synthetic construct
  source 1..21: mol_type = other RNA
  modified_base 1: mod_base = OTHER; note = 2'-deoxy-2'-fluoroadenosine-3'-phosphate
  modified_base 2: mod_base = OTHER; note = 2'-O-methyluridine-3'-phosphate
  modified_base 3: mod_base = OTHER; note = 2'-deoxy-2'-fluoroguanosine-3'-phosphate
  modified_base 4: mod_base = OTHER; note = 2'-O-methyluridine-3'-phosphate
  modified_base 5: mod_base = OTHER; note = 2'-deoxy-2'-fluoroadenosine-3'-phosphate
  modified_base 6: mod_base = OTHER; note = 2'-O-methyladenosine-3'-phosphate
  modified_base 7: mod_base = OTHER; note = 2'-deoxy-2'-fluorocytidine-3'-phosphate
  modified_base 8: mod_base = OTHER; note = 2'-O-methylcytidine-3'-phosphate
  modified_base 9: mod_base = OTHER; note = 2'-deoxy-2'-fluoroadenosine-3'-phosphate
  modified_base 10: mod_base = OTHER; note = 2'-deoxy-2'-fluoroadenosine-3'-phosphate
  modified_base 11: mod_base = OTHER; note = 2'-deoxy-2'-fluoroguanosine-3'-phosphate
  modified_base 12: mod_base = OTHER; note = 2'-O-methyladenosine-3'-phosphate
  modified_base 13: mod_base = OTHER; note = 2'-deoxy-2'-fluoroguanosine-3'-phosphate
  modified_base 14: mod_base = OTHER; note = 2'-O-methyluridine-3'-phosphate
  modified_base 15: mod_base = OTHER; note = 2'-deoxy-2'-fluoroadenosine-3'-phosphate
  modified_base 16: mod_base = OTHER; note = 2'-O-methyluridine-3'-phosphate
  modified_base 17: mod_base = OTHER; note = 2'-O-methyluridine-3'-phosphate
  modified_base 18: mod_base = OTHER; note = 2'-O-methylcytidine-3'-phosphate
  modified_base 19: mod_base = OTHER; note = 2'-deoxy-2'-fluorocytidine-3'-phosphate
  modified_base 20: mod_base = OTHER; note = 2'-O-methyladenosine-3'-phosphorothioate
  modified_base 21: mod_base = OTHER; note = 2'-deoxy-2'-fluorouridine
atgtaaccaagagtattccat

SEQ ID NO: 11 - RNA, 21 nt, synthetic construct
  source 1..21: mol_type = other RNA
  modified_base 1: mod_base = OTHER; note = 2'-deoxy-2'-fluoroadenosine-3'-phosphate
  modified_base 2: mod_base = OTHER; note = 2'-O-methyluridine-3'-phosphate
  modified_base 3: mod_base = OTHER; note = 2'-deoxy-2'-fluoroguanosine-3'-phosphate
  modified_base 4: mod_base = OTHER; note = 2'-O-methyluridine-3'-phosphate
  modified_base 5: mod_base = OTHER; note = 2'-deoxy-2'-fluoroadenosine-3'-phosphate
  modified_base 6: mod_base = OTHER; note = 2'-deoxy-2'-fluoroadenosine-3'-phosphate
  modified_base 7: mod_base = OTHER; note = 2'-O-methylcytidine-3'-phosphate
  modified_base 8: mod_base = OTHER; note = 2'-O-methylcytidine-3'-phosphate
  modified_base 9: mod_base = OTHER; note = 2'-deoxy-2'-fluoroadenosine-3'-phosphate
  modified_base 10: mod_base = OTHER; note = 2'-deoxy-2'-fluoroadenosine-3'-phosphate
  modified_base 11: mod_base = OTHER; note = 2'-deoxy-2'-fluoroguanosine-3'-phosphate
  modified_base 12: mod_base = OTHER; note = 2'-O-methyladenosine-3'-phosphate
  modified_base 13: mod_base = OTHER; note = 2'-deoxy-2'-fluoroguanosine-3'-phosphate
  modified_base 14: mod_base = OTHER; note = 2'-O-methyluridine-3'-phosphate
  modified_base 15: mod_base = OTHER; note = 2'-deoxy-2'-fluoroadenosine-3'-phosphate
  modified_base 16: mod_base = OTHER; note = 2'-O-methyluridine-3'-phosphate
  modified_base 17: mod_base = OTHER; note = 2'-deoxy-2'-fluorouridine-3'-phosphate
  modified_base 18: mod_base = OTHER; note = 2'-O-methylcytidine-3'-phosphate
  modified_base 19: mod_base = OTHER; note = 2'-deoxy-2'-fluorocytidine-3'-phosphate
  modified_base 20: mod_base = OTHER; note = 2'-O-methyladenosine-3'-phosphorothioate
  modified_base 21: mod_base = OTHER; note = 2'-deoxy-2'-fluorouridine
atgtaaccaagagtattccat

SEQ ID NO: 12 - RNA, 21 nt, synthetic construct
  source 1..21: mol_type = other RNA
  modified_base 1: mod_base = OTHER; note = 2'-deoxy-2'-fluoroadenosine-3'-phosphate
  modified_base 2: mod_base = OTHER; note = 2'-O-methyluridine-3'-phosphate
  modified_base 3: mod_base = OTHER; note = 2'-deoxy-2'-fluoroguanosine-3'-phosphate
  modified_base 4: mod_base = OTHER; note = 2'-O-methyluridine-3'-phosphate
  modified_base 5: mod_base = OTHER; note = 2'-deoxy-2'-fluoroadenosine-3'-phosphate
  modified_base 6: mod_base = OTHER; note = 2'-deoxy-2'-fluoroadenosine-3'-phosphate
  modified_base 7: mod_base = OTHER; note = 2'-deoxy-2'-fluorocytidine-3'-phosphate
  modified_base 8: mod_base = OTHER; note = 2'-O-methylcytidine-3'-phosphate
  modified_base 9: mod_base = OTHER; note = 2'-deoxy-2'-fluoroadenosine-3'-phosphate
  modified_base 10: mod_base = OTHER; note = 2'-deoxy-2'-fluoroadenosine-3'-phosphate
  modified_base 11: mod_base = OTHER; note = 2'-deoxy-2'-fluoroguanosine-3'-phosphate
  modified_base 12: mod_base = OTHER; note = 2'-O-methyladenosine-3'-phosphate
  modified_base 13: mod_base = OTHER; note = 2'-deoxy-2'-fluoroguanosine-3'-phosphate
  modified_base 14: mod_base = OTHER; note = 2'-O-methyluridine-3'-phosphate
  modified_base 15: mod_base = OTHER; note = 2'-deoxy-2'-fluoroadenosine-3'-phosphate
  modified_base 16: mod_base = OTHER; note = 2'-O-methyluridine-3'-phosphate
  modified_base 17: mod_base = OTHER; note = 2'-deoxy-2'-fluorouridine-3'-phosphate
  modified_base 18: mod_base = OTHER; note = 2'-O-methylcytidine-3'-phosphate
  modified_base 19: mod_base = OTHER; note = 2'-deoxy-2'-fluorocytidine-3'-phosphate
  modified_base 20: mod_base = OTHER; note = 2'-O-methyladenosine-3'-phosphorothioate
  modified_base 21: mod_base = OTHER; note = 2'-deoxy-2'-fluorouridine
atgtaaccaagagtattccat

SEQ ID NO: 13 - DNA, 21 bp, synthetic construct
  source 1..21: mol_type = other DNA
  modified_base 1: mod_base = OTHER; note = 2'-O-methyladenosine-3'-phosphate
  modified_base 2: mod_base = OTHER; note = 2'-O-methyluridine-3'-phosphate
  modified_base 3: mod_base = OTHER; note = 2'-O-methylguanosine-3'-phosphate
  modified_base 4: mod_base = OTHER; note = 2'-O-methyluridine-3'-phosphate
  modified_base 5: mod_base = OTHER; note = 2'-O-methyladenosine-3'-phosphate
  modified_base 6: mod_base = OTHER; note = 2'-O-methyladenosine-3'-phosphate
  modified_base 7: mod_base = OTHER; note = 2'-O-methylcytidine-3'-phosphate
  modified_base 8: mod_base = OTHER; note = 2'-O-methylcytidine-3'-phosphate
  modified_base 9: mod_base = OTHER; note = 2'-O-methyladenosine-3'-phosphate
  modified_base 10: mod_base = OTHER; note = 2'-O-methyladenosine-3'-phosphate
  modified_base 12: mod_base = OTHER; note = 2'-O-methyladenosine-3'-phosphate
  modified_base 14: mod_base = OTHER; note = 2'-O-methyluridine-3'-phosphate
  modified_base 16: mod_base = OTHER; note = 2'-O-methyluridine-3'-phosphate
  modified_base 18: mod_base = OTHER; note = 2'-O-methylcytidine-3'-phosphate
  modified_base 20: mod_base = OTHER; note = 2'-O-methyladenosine-3'-phosphorothioate
  modified_base 21: mod_base = OTHER; note = 2'-O-methyluridine
  misc_feature 1..10: note = RNA
  misc_feature 12: note = RNA
  misc_feature 14: note = RNA
  misc_feature 16: note = RNA
  misc_feature 18: note = RNA
  misc_feature 20..21: note = RNA
  misc_feature 11: note = DNA
  misc_feature 13: note = DNA
  misc_feature 15: note = DNA
  misc_feature 17: note = DNA
  misc_feature 19: note = DNA
atgtaaccaagagtatacgat

SEQ ID NO: 14 - RNA, 21 nt, synthetic construct
  source 1..21: mol_type = other RNA
  modified_base 1: mod_base = OTHER; note = 2'-deoxy-2'-fluorouridine-3'-phosphate
  modified_base 2: mod_base = OTHER; note = 2'-O-methylguanosine-3'-phosphate
  modified_base 3: mod_base = OTHER; note = 2'-deoxy-2'-fluoroguanosine-3'-phosphate
  modified_base 4: mod_base = OTHER; note = 2'-deoxy-2'-fluoroguanosine-3'-phosphate
  modified_base 5: mod_base = OTHER; note = 2'-deoxy-2'-fluoroadenosine-3'-phosphate
  modified_base 6: mod_base = OTHER; note = 2'-O-methyluridine-3'-phosphate
  modified_base 7: mod_base = OTHER; note = 2'-deoxy-2'-fluorouridine-3'-phosphate
  modified_base 8: mod_base = OTHER; note = 2'-O-methyluridine-3'-phosphate
  modified_base 9: mod_base = OTHER; note = 2'-deoxy-2'-fluorocytidine-3'-phosphate
  modified_base 10: mod_base = OTHER; note = 2'-deoxy-2'-fluoroadenosine-3'-phosphate
  modified_base 11: mod_base = OTHER; note = 2'-deoxy-2'-fluorouridine-3'-phosphate
  modified_base 12: mod_base = OTHER; note = 2'-O-methylguanosine-3'-phosphate
  modified_base 13: mod_base = OTHER; note = 2'-deoxy-2'-fluorouridine-3'-phosphate
  modified_base 14: mod_base = OTHER; note = 2'-O-methyladenosine-3'-phosphate
  modified_base 15: mod_base = OTHER; note = 2'-deoxy-2'-fluoroadenosine-3'-phosphate
  modified_base 16: mod_base = OTHER; note = 2'-O-methylcytidine-3'-phosphate
  modified_base 17: mod_base = OTHER; note = 2'-deoxy-2'-fluorocytidine-3'-phosphate
  modified_base 18: mod_base = OTHER; note = 2'-deoxy-2'-fluoroadenosine-3'-phosphate
  modified_base 19: mod_base = OTHER; note = 2'-deoxy-2'-fluoroadenosine-3'-phosphate
  modified_base 20: mod_base = OTHER; note = 2'-O-methylguanosine-3'-phosphorothioate
  modified_base 21: mod_base = OTHER; note = 2'-deoxy-2'-fluoroadenosine
tgggatttcatgtaaccaaga

SEQ ID NO: 15 - RNA, 21 nt, synthetic construct
  source 1..21: mol_type = other RNA
  modified_base 1: mod_base = OTHER; note = 2'-deoxy-2'-fluorouridine-3'-phosphate
  modified_base 2: mod_base = OTHER; note = 2'-O-methylguanosine-3'-phosphate
  modified_base 3: mod_base = OTHER; note = 2'-deoxy-2'-fluoroguanosine-3'-phosphate
  modified_base 4: mod_base = OTHER; note = 2'-O-methylguanosine-3'-phosphate
  modified_base 5: mod_base = OTHER; note = 2'-O-methyladenosine-3'-phosphate
  modified_base 6: mod_base = OTHER; note = 2'-O-methyluridine-3'-phosphate
  modified_base 7: mod_base = OTHER; note = 2'-deoxy-2'-fluorouridine-3'-phosphate
  modified_base 8: mod_base = OTHER; note = 2'-O-methyluridine-3'-phosphate
  modified_base 9: mod_base = OTHER; note = 2'-deoxy-2'-fluorocytidine-3'-phosphate
  modified_base 10: mod_base = OTHER; note = 2'-deoxy-2'-fluoroadenosine-3'-phosphate
  modified_base 11: mod_base = OTHER; note = 2'-deoxy-2'-fluorouridine-3'-phosphate
  modified_base 12: mod_base = OTHER; note = 2'-O-methylguanosine-3'-phosphate
  modified_base 13: mod_base = OTHER; note = 2'-deoxy-2'-fluorouridine-3'-phosphate
  modified_base 14: mod_base = OTHER; note = 2'-O-methyladenosine-3'-phosphate
  modified_base 15: mod_base = OTHER; note = 2'-deoxy-2'-fluoroadenosine-3'-phosphate
  modified_base 16: mod_base = OTHER; note = 2'-O-methylcytidine-3'-phosphate
  modified_base 17: mod_base = OTHER; note = 2'-deoxy-2'-fluorocytidine-3'-phosphate
  modified_base 18: mod_base = OTHER; note = 2'-O-methyladenosine-3'-phosphate
  modified_base 19: mod_base = OTHER; note = 2'-deoxy-2'-fluoroadenosine-3'-phosphate
  modified_base 20: mod_base = OTHER; note = 2'-O-methylguanosine-3'-phosphorothioate
  modified_base 21: mod_base = OTHER; note = 2'-deoxy-2'-fluoroadenosine
tgggatttcatgtaaccaaga

SEQ ID NO: 16 - RNA, 21 nt, synthetic construct
  source 1..21: mol_type = other RNA
  modified_base 1: mod_base = OTHER; note = 2'-O-methyladenosine-3'-phosphate
  modified_base 2: mod_base = OTHER; note = 2'-deoxy-2'-fluorouridine-3'-phosphate
  modified_base 3: mod_base = OTHER; note = 2'-deoxy-2'-fluoroguanosine-3'-phosphate
  modified_base 4: mod_base = OTHER; note = 2'-O-methyluridine-3'-phosphate
  modified_base 5: mod_base = OTHER; note = 2'-deoxy-2'-fluoroadenosine-3'-phosphate
  modified_base 6: mod_base = OTHER; note = 2'-deoxy-2'-fluoroadenosine-3'-phosphate
  modified_base 7: mod_base = OTHER; note = 2'-O-methylcytidine-3'-phosphate
  modified_base 8: mod_base = OTHER; note = 2'-O-methylcytidine-3'-phosphate
  modified_base 9: mod_base = OTHER; note = 2'-deoxy-2'-fluoroadenosine-3'-phosphate
  modified_base 10: mod_base = OTHER; note = 2'-deoxy-2'-fluoroadenosine-3'-phosphate
  modified_base 11: mod_base = OTHER; note = 2'-deoxy-2'-fluoroguanosine-3'-phosphate
  modified_base 12: mod_base = OTHER; note = 2'-O-methyladenosine-3'-phosphate
  modified_base 13: mod_base = OTHER; note = 2'-deoxy-2'-fluoroguanosine-3'-phosphate
  modified_base 14: mod_base = OTHER; note = 2'-O-methyluridine-3'-phosphate
  modified_base 15: mod_base = OTHER; note = 2'-deoxy-2'-fluoroadenosine-3'-phosphate
  modified_base 16: mod_base = OTHER; note = 2'-O-methyluridine-3'-phosphate
  modified_base 17: mod_base = OTHER; note = 2'-deoxy-2'-fluorouridine-3'-phosphate
  modified_base 18: mod_base = OTHER; note = 2'-O-methylcytidine-3'-phosphate
  modified_base 19: mod_base = OTHER; note = 2'-deoxy-2'-fluorocytidine-3'-phosphate
  modified_base 20: mod_base = OTHER; note = 2'-O-methyladenosine-3'-phosphorothioate
  modified_base 21: mod_base = OTHER; note = 2'-deoxy-2'-fluorouridine
atgtaaccaagagtattccat

SEQ ID NO: 17 - RNA, 21 nt, synthetic construct
  source 1..21: mol_type = other RNA
  modified_base 1: mod_base = OTHER; note = 2'-deoxy-2'-fluorouridine-3'-phosphate
  modified_base 2: mod_base = OTHER; note = 2'-O-methylguanosine-3'-phosphate
  modified_base 3: mod_base = OTHER; note = 2'-deoxy-2'-fluoroguanosine-3'-phosphate
  modified_base 4: mod_base = OTHER; note = 2'-O-methylguanosine-3'-phosphate
  modified_base 5: mod_base = OTHER; note = 2'-deoxy-2'-fluoroadenosine-3'-phosphate
  modified_base 6: mod_base = OTHER; note = 2'-O-methyluridine-3'-phosphate
  modified_base 7: mod_base = OTHER; note = 2'-deoxy-2'-fluorouridine-3'-phosphate
  modified_base 8: mod_base = OTHER; note = 2'-O-methyluridine-3'-phosphate
  modified_base 9: mod_base = OTHER; note = 2'-deoxy-2'-fluorocytidine-3'-phosphate
  modified_base 10: mod_base = OTHER; note = 2'-deoxy-2'-fluoroadenosine-3'-phosphate
  modified_base 11: mod_base = OTHER; note = 2'-deoxy-2'-fluorouridine-3'-phosphate
  modified_base 12: mod_base = OTHER; note = 2'-O-methylguanosine-3'-phosphate
  modified_base 13: mod_base = OTHER; note = 2'-deoxy-2'-fluorouridine-3'-phosphate
  modified_base 14: mod_base = OTHER; note = 2'-O-methyladenosine-3'-phosphate
  modified_base 15: mod_base = OTHER; note = 2'-O-methyladenosine-3'-phosphate
  modified_base 16: mod_base = OTHER; note = 2'-O-methylcytidine-3'-phosphate
  modified_base 17: mod_base = OTHER; note = 2'-deoxy-2'-fluorocytidine-3'-phosphate
  modified_base 18: mod_base = OTHER; note = 2'-O-methyladenosine-3'-phosphate
  modified_base 19: mod_base = OTHER; note = 2'-deoxy-2'-fluoroadenosine-3'-phosphate
  modified_base 20: mod_base = OTHER; note = 2'-O-methylguanosine-3'-phosphorothioate
  modified_base 21: mod_base = OTHER; note = 2'-deoxy-2'-fluoroadenosine
tgggatttcatgtaaccaaga

SEQ ID NO: 18 - DNA, 21 bp, synthetic construct
  source 1..21: mol_type = other DNA
  modified_base 1: mod_base = OTHER; note = 2'-O-methyladenosine-3'-phosphate
  modified_base 2: mod_base = OTHER; note = 2'-O-methyluridine-3'-phosphate
  modified_base 3: mod_base = OTHER; note = 2'-O-methylguanosine-3'-phosphate
  modified_base 4: mod_base = OTHER; note = 2'-O-methyluridine-3'-phosphate
  modified_base 5: mod_base = OTHER; note = 2'-O-methyladenosine-3'-phosphate
  modified_base 6: mod_base = OTHER; note = 2'-O-methyladenosine-3'-phosphate
  modified_base 7: mod_base = OTHER; note = 2'-O-methylcytidine-3'-phosphate
  modified_base 8: mod_base = OTHER; note = 2'-O-methylcytidine-3'-phosphate
  modified_base 9: mod_base = OTHER; note = 2'-O-methyladenosine-3'-phosphate
  modified_base 10: mod_base = OTHER; note = 2'-O-methyladenosine-3'-phosphate
  modified_base 12: mod_base = OTHER; note = 2'-O-methyladenosine-3'-phosphate
  modified_base 14: mod_base = OTHER; note = 2'-O-methyluridine-3'-phosphate
  modified_base 16: mod_base = OTHER; note = 2'-O-methyluridine-3'-phosphate
  modified_base 18: mod_base = OTHER; note = 2'-O-methylcytidine-3'-phosphate
  modified_base 20: mod_base = OTHER; note = 2'-O-methyladenosine-3'-phosphorothioate
  modified_base 21: mod_base = OTHER; note = 2'-O-methyluridine
  misc_feature 1..10: note = RNA
  misc_feature 12: note = RNA
  misc_feature 14: note = RNA
  misc_feature 16: note = RNA
  misc_feature 18: note = RNA
  misc_feature 20..21: note = RNA
  misc_feature 11: note = DNA
  misc_feature 13: note = DNA
  misc_feature 15: note = DNA
  misc_feature 17: note = DNA
  misc_feature 19: note = DNA
atgtaaccaagagtatacgat

SEQ ID NO: 19 - RNA, 21 nt, synthetic construct
  source 1..21: mol_type = other RNA
  modified_base 1: mod_base = OTHER; note = 2'-deoxy-2'-fluoroadenosine-3'-phosphate
  modified_base 2: mod_base = OTHER; note = 2'-O-methyluridine-3'-phosphate
  modified_base 3: mod_base = OTHER; note = 2'-deoxy-2'-fluoroguanosine-3'-phosphate
  modified_base 4: mod_base = OTHER; note = 2'-O-methyluridine-3'-phosphate
  modified_base 5: mod_base = OTHER; note = 2'-O-methyladenosine-3'-phosphate
  modified_base 6: mod_base = OTHER; note = 2'-O-methyladenosine-3'-phosphate
  modified_base 7: mod_base = OTHER; note = 2'-deoxy-2'-fluorocytidine-3'-phosphate
  modified_base 8: mod_base = OTHER; note = 2'-O-methylcytidine-3'-phosphate
  modified_base 9: mod_base = OTHER; note = 2'-deoxy-2'-fluoroadenosine-3'-phosphate
  modified_base 10: mod_base = OTHER; note = 2'-deoxy-2'-fluoroadenosine-3'-phosphate
  modified_base 11: mod_base = OTHER; note = 2'-deoxy-2'-fluoroguanosine-3'-phosphate
  modified_base 12: mod_base = OTHER; note = 2'-O-methyladenosine-3'-phosphate
  modified_base 13: mod_base = OTHER; note = 2'-deoxy-2'-fluoroguanosine-3'-phosphate
  modified_base 14: mod_base = OTHER; note = 2'-O-methyluridine-3'-phosphate
  modified_base 15: mod_base = OTHER; note = 2'-deoxy-2'-fluoroadenosine-3'-phosphate
  modified_base 16: mod_base = OTHER; note = 2'-O-methyluridine-3'-phosphate
  modified_base 17: mod_base = OTHER; note = 2'-deoxy-2'-fluorouridine-3'-phosphate
  modified_base 18: mod_base = OTHER; note = 2'-O-methylcytidine-3'-phosphate
  modified_base 19: mod_base = OTHER; note = 2'-deoxy-2'-fluorocytidine-3'-phosphate
  modified_base 20: mod_base = OTHER; note = 2'-O-methyladenosine-3'-phosphorothioate
  modified_base 21: mod_base = OTHER; note = 2'-deoxy-2'-fluorouridine
atgtaaccaagagtattccat

SEQ ID NO: 20 - DNA, 21 bp, synthetic construct
  source 1..21: mol_type = other DNA
  modified_base 1: mod_base = OTHER; note = 2'-deoxy-2'-fluoroadenosine-3'-phosphate
  modified_base 2: mod_base = OTHER; note = 2'-O-methyluridine-3'-phosphate
  modified_base 3: mod_base = OTHER; note = 2'-O-methylguanosine-3'-phosphate
  modified_base 4: mod_base = OTHER; note = 2'-O-methyluridine-3'-phosphate
  modified_base 5: mod_base = OTHER; note = 2'-deoxy-2'-fluoroadenosine-3'-phosphate
  modified_base 6: mod_base = OTHER; note = 2'-O-methyladenosine-3'-phosphate
  modified_base 7: mod_base = OTHER; note = 2'-O-methylcytidine-3'-phosphate
  modified_base 8: mod_base = OTHER; note = 2'-O-methylcytidine-3'-phosphate
  modified_base 9: mod_base = OTHER; note = 2'-deoxy-2'-fluoroadenosine-3'-phosphate
  modified_base 10: mod_base = OTHER; note = 2'-O-methyladenosine-3'-phosphate
  modified_base 11: mod_base = OTHER; note = 2'-deoxy-2'-fluoroguanosine-3'-phosphate
  modified_base 13: mod_base = OTHER; note = 2'-deoxy-2'-fluoroguanosine-3'-phosphate
  modified_base 15: mod_base = OTHER; note = adenosine-3'-phosphate
  modified_base 17: mod_base = OTHER; note = 2'-O-methyluridine-3'-phosphate
  modified_base 19: mod_base = OTHER; note = 2'-O-methylcytidine-3'-phosphate
  modified_base 20: mod_base = OTHER; note = 2'-deoxyadenosine-3'-phosphorothioate
  modified_base 21: mod_base = OTHER; note = 2'-O-methyluridine
  misc_feature 1..11: note = RNA
  misc_feature 13: note = RNA
  misc_feature 15: note = RNA
  misc_feature 17: note = RNA
  misc_feature 19: note = RNA
  misc_feature 21: note = RNA
  misc_feature 12: note = DNA
  misc_feature 14: note = DNA
  misc_feature 16: note = DNA
  misc_feature 18: note = DNA
  misc_feature 20: note = DNA
atgtaaccaagagtattccat

SEQ ID NO: 21 - RNA, 21 nt, synthetic construct
  source 1..21: mol_type = other RNA
  modified_base 1: mod_base = OTHER; note = 2'-O-methyladenosine-3'-phosphate
  modified_base 2: mod_base = OTHER; note = 2'-O-methyluridine-3'-phosphate
  modified_base 3: mod_base = OTHER; note = 2'-deoxy-2'-fluoroguanosine-3'-phosphate
  modified_base 4: mod_base = OTHER; note = 2'-O-methyluridine-3'-phosphate
  modified_base 5: mod_base = OTHER; note = 2'-deoxy-2'-fluoroadenosine-3'-phosphate
  modified_base 6: mod_base = OTHER; note = 2'-O-methyladenosine-3'-phosphate
  modified_base 7: mod_base = OTHER; note = 2'-deoxy-2'-fluorocytidine-3'-phosphate
  modified_base 8: mod_base = OTHER; note = 2'-O-methylcytidine-3'-phosphate
  modified_base 9: mod_base = OTHER; note = 2'-deoxy-2'-fluoroadenosine-3'-phosphate
  modified_base 10: mod_base = OTHER; note = 2'-deoxy-2'-fluoroadenosine-3'-phosphate
  modified_base 11: mod_base = OTHER; note = 2'-deoxy-2'-fluoroguanosine-3'-phosphate
  modified_base 12: mod_base = OTHER; note = 2'-O-methyladenosine-3'-phosphate
  modified_base 13: mod_base = OTHER; note = 2'-deoxy-2'-fluoroguanosine-3'-phosphate
  modified_base 14: mod_base = OTHER; note = 2'-O-methyluridine-3'-phosphate
  modified_base 15: mod_base = OTHER; note = 2'-deoxy-2'-fluoroadenosine-3'-phosphate
  modified_base 16: mod_base = OTHER; note = 2'-O-methyluridine-3'-phosphate
  modified_base 17: mod_base = OTHER; note = 2'-deoxy-2'-fluorouridine-3'-phosphate
  modified_base 18: mod_base = OTHER; note = 2'-O-methylcytidine-3'-phosphate
  modified_base 19: mod_base = OTHER; note = 2'-deoxy-2'-fluorocytidine-3'-phosphate
  modified_base 20: mod_base = OTHER; note = 2'-O-methyladenosine-3'-phosphorothioate
  modified_base 21: mod_base = OTHER; note = 2'-deoxy-2'-fluorouridine
atgtaaccaagagtattccat

SEQ ID NO: 22 - RNA, 21 nt, synthetic construct
  source 1..21: mol_type = other RNA
  modified_base 1: mod_base = OTHER; note = 2'-deoxy-2'-fluorouridine-3'-phosphate
  modified_base 2: mod_base = OTHER; note = 2'-deoxy-2'-fluoroguanosine-3'-phosphate
  modified_base 3: mod_base = OTHER; note = 2'-O-methylguanosine-3'-phosphate
  modified_base 4: mod_base = OTHER; note = 2'-O-methylguanosine-3'-phosphate
  modified_base 5: mod_base = OTHER; note = 2'-deoxy-2'-fluoroadenosine-3'-phosphate
  modified_base 6: mod_base = OTHER; note = 2'-O-methyluridine-3'-phosphate
  modified_base 7: mod_base = OTHER; note = 2'-deoxy-2'-fluorouridine-3'-phosphate
  modified_base 8: mod_base = OTHER; note = 2'-O-methyluridine-3'-phosphate
  modified_base 9: mod_base = OTHER; note = 2'-deoxy-2'-fluorocytidine-3'-phosphate
  modified_base 10: mod_base = OTHER; note = 2'-deoxy-2'-fluoroadenosine-3'-phosphate
  modified_base 11: mod_base = OTHER; note = 2'-deoxy-2'-fluorouridine-3'-phosphate
  modified_base 12: mod_base = OTHER; note = 2'-O-methylguanosine-3'-phosphate
  modified_base 13: mod_base = OTHER; note = 2'-deoxy-2'-fluorouridine-3'-phosphate
  modified_base 14: mod_base = OTHER; note = 2'-deoxy-2'-fluoroadenosine-3'-phosphate
  modified_base 15: mod_base = OTHER; note = 2'-deoxy-2'-fluoroadenosine-3'-phosphate
  modified_base 16: mod_base = OTHER; note = 2'-O-methylcytidine-3'-phosphate
  modified_base 17: mod_base = OTHER; note = 2'-deoxy-2'-fluorocytidine-3'-phosphate
  modified_base 18: mod_base = OTHER; note = 2'-O-methyladenosine-3'-phosphate
  modified_base 19: mod_base = OTHER; note = 2'-deoxy-2'-fluoroadenosine-3'-phosphate
  modified_base 20: mod_base = OTHER; note = 2'-O-methylguanosine-3'-phosphorothioate
  modified_base 21: mod_base = OTHER; note = 2'-deoxy-2'-fluoroadenosine
tgggatttcatgtaaccaaga

SEQ ID NO: 23 - RNA, 21 nt, synthetic construct
  source 1..21: mol_type = other RNA
  modified_base 1: mod_base = OTHER; note = 2'-deoxy-2'-fluoroadenosine-3'-phosphate
  modified_base 2: mod_base = OTHER; note = 2'-O-methyluridine-3'-phosphate
  modified_base 3: mod_base = OTHER; note = 2'-O-methylguanosine-3'-phosphate
  modified_base 4: mod_base = OTHER; note = 2'-O-methyluridine-3'-phosphate
  modified_base 5: mod_base = OTHER; note = 2'-deoxy-2'-fluoroadenosine-3'-phosphate
  modified_base 6: mod_base = OTHER; note = 2'-O-methyladenosine-3'-phosphate
  modified_base 7: mod_base = OTHER; note = 2'-deoxy-2'-fluorocytidine-3'-phosphate
  modified_base 8: mod_base = OTHER; note = 2'-O-methylcytidine-3'-phosphate
  modified_base 9: mod_base = OTHER; note = 2'-deoxy-2'-fluoroadenosine-3'-phosphate
  modified_base 10: mod_base = OTHER; note = 2'-deoxy-2'-fluoroadenosine-3'-phosphate
  modified_base 11: mod_base = OTHER; note = 2'-deoxy-2'-fluoroguanosine-3'-phosphate
  modified_base 12: mod_base = OTHER; note = 2'-O-methyladenosine-3'-phosphate
  modified_base 13: mod_base = OTHER; note = 2'-deoxy-2'-fluoroguanosine-3'-phosphate
  modified_base 14: mod_base = OTHER; note = 2'-O-methyluridine-3'-phosphate
  modified_base 15: mod_base = OTHER; note = 2'-deoxy-2'-fluoroadenosine-3'-phosphate
  modified_base 16: mod_base = OTHER; note = 2'-O-methyluridine-3'-phosphate
  modified_base 17: mod_base = OTHER; note = 2'-deoxy-2'-fluorouridine-3'-phosphate
  modified_base 18: mod_base = OTHER; note = 2'-O-methylcytidine-3'-phosphate
  modified_base 19: mod_base = OTHER; note = 2'-deoxy-2'-fluorocytidine-3'-phosphate
  modified_base 20: mod_base = OTHER; note = 2'-O-methyladenosine-3'-phosphorothioate
  modified_base 21: mod_base = OTHER; note = 2'-deoxy-2'-fluorouridine
atgtaaccaagagtattccat

SEQ ID NO: 24 - RNA, 21 nt, synthetic construct
  source 1..21: mol_type = other RNA
  modified_base 1: mod_base = OTHER; note = 2'-deoxy-2'-fluoroadenosine-3'-phosphate
  modified_base 2: mod_base = OTHER; note = 2'-O-methyluridine-3'-phosphate
  modified_base 3: mod_base = OTHER; note = 2'-deoxy-2'-fluoroguanosine-3'-phosphate
  modified_base 4: mod_base = OTHER; note = 2'-O-methyluridine-3'-phosphate
  modified_base 5: mod_base = OTHER; note = 2'-deoxy-2'-fluoroadenosine-3'-phosphate
  modified_base 6: mod_base = OTHER; note = 2'-O-methyladenosine-3'-phosphate
  modified_base 7: mod_base = OTHER; note = 2'-O-methylcytidine-3'-phosphate
  modified_base 8: mod_base = OTHER; note = 2'-O-methylcytidine-3'-phosphate
  modified_base 9: mod_base = OTHER; note = 2'-deoxy-2'-fluoroadenosine-3'-phosphate
  modified_base 10: mod_base = OTHER; note = 2'-deoxy-2'-fluoroadenosine-3'-phosphate
  modified_base 11: mod_base = OTHER; note = 2'-deoxy-2'-fluoroguanosine-3'-phosphate
  modified_base 12: mod_base = OTHER; note = 2'-O-methyladenosine-3'-phosphate
  modified_base 13: mod_base = OTHER; note = 2'-deoxy-2'-fluoroguanosine-3'-phosphate
  modified_base 14: mod_base = OTHER; note = 2'-O-methyluridine-3'-phosphate
  modified_base 15: mod_base = OTHER; note = 2'-deoxy-2'-fluoroadenosine-3'-phosphate
  modified_base 16: mod_base = OTHER; note = 2'-O-methyluridine-3'-phosphate
  modified_base 17: mod_base = OTHER; note = 2'-deoxy-2'-fluorouridine-3'-phosphate
  modified_base 18: mod_base = OTHER; note = 2'-O-methylcytidine-3'-phosphate
  modified_base 19: mod_base = OTHER; note = 2'-deoxy-2'-fluorocytidine-3'-phosphate
  modified_base 20: mod_base = OTHER; note = 2'-O-methyladenosine-3'-phosphorothioate
  modified_base 21: mod_base = OTHER; note = 2'-deoxy-2'-fluorouridine
atgtaaccaagagtattccat

SEQ ID NO: 25 - RNA, 21 nt, synthetic construct
  source 1..21: mol_type = other RNA
  modified_base 1: mod_base = OTHER; note = 2'-deoxy-2'-fluoroadenosine-3'-phosphorothioate
  modified_base 2: mod_base = OTHER; note = 2'-O-methyluridine-3'-phosphate
  modified_base 3: mod_base = OTHER; note = 2'-deoxy-2'-fluoroguanosine-3'-phosphate
  modified_base 4: mod_base = OTHER; note = 2'-O-methyluridine-3'-phosphate
  modified_base 5: mod_base = OTHER; note = 2'-deoxy-2'-fluoroadenosine-3'-phosphate
  modified_base 6: mod_base = OTHER; note = 2'-O-methyladenosine-3'-phosphate
  modified_base 7: mod_base = OTHER; note = 2'-deoxy-2'-fluorocytidine-3'-phosphate
  modified_base 8: mod_base = OTHER; note = 2'-O-methylcytidine-3'-phosphate
  modified_base 9: mod_base = OTHER; note = 2'-deoxy-2'-fluoroadenosine-3'-phosphate
  modified_base 10: mod_base = OTHER; note = 2'-deoxy-2'-fluoroadenosine-3'-phosphate
  modified_base 11: mod_base = OTHER; note = 2'-deoxy-2'-fluoroguanosine-3'-phosphate
  modified_base 12: mod_base = OTHER; note = 2'-O-methyladenosine-3'-phosphate
  modified_base 13: mod_base = OTHER; note = 2'-deoxy-2'-fluoroguanosine-3'-phosphate
  modified_base 14: mod_base = OTHER; note = 2'-O-methyluridine-3'-phosphate
  modified_base 15: mod_base = OTHER; note = 2'-deoxy-2'-fluoroadenosine-3'-phosphate
  modified_base 16: mod_base = OTHER; note = 2'-O-methyluridine-3'-phosphate
  modified_base 17: mod_base = OTHER; note = 2'-O-methyluridine-3'-phosphate
  modified_base 18: mod_base = OTHER; note = 2'-O-methylcytidine-3'-phosphate
  modified_base 19: mod_base = OTHER; note = 2'-deoxy-2'-fluorocytidine-3'-phosphate
  modified_base 20: mod_base = OTHER; note = 2'-O-methyladenosine-3'-phosphorothioate
  modified_base 21: mod_base = OTHER; note = 2'-deoxy-2'-fluorouridine
atgtaaccaagagtattccat

SEQ ID NO: 26 - RNA, 21 nt, synthetic construct
  source 1..21: mol_type = other RNA
  modified_base 1: mod_base = OTHER; note = 2'-O-methyladenosine-3'-phosphate
  modified_base 2: mod_base = OTHER; note = 2'-deoxy-2'-fluorouridine-3'-phosphate
  modified_base 3: mod_base = OTHER; note = 2'-O-methylguanosine-3'-phosphate
  modified_base 4: mod_base = OTHER; note = 2'-O-methyluridine-3'-phosphate
  modified_base 5: mod_base = OTHER; note = 2'-deoxy-2'-fluoroadenosine-3'-phosphate
  modified_base 6: mod_base = OTHER; note = 2'-deoxy-2'-fluoroadenosine-3'-phosphate
  modified_base 7: mod_base = OTHER; note = 2'-O-methylcytidine-3'-phosphate
  modified_base 8: mod_base = OTHER; note = 2'-O-methylcytidine-3'-phosphate
  modified_base 9: mod_base = OTHER; note = 2'-deoxy-2'-fluoroadenosine-3'-phosphate
  modified_base 10: mod_base = OTHER; note = 2'-deoxy-2'-fluoroadenosine-3'-phosphate
  modified_base 11: mod_base = OTHER; note = 2'-O-methylguanosine-3'-phosphate
  modified_base 12: mod_base = OTHER; note = 2'-O-methyladenosine-3'-phosphate
  modified_base 13: mod_base = OTHER; note = 2'-O-methylguanosine-3'-phosphate
  modified_base 14: mod_base = OTHER; note = 2'-deoxy-2'-fluorouridine-3'-phosphate
  modified_base 15: mod_base = OTHER; note = 2'-O-methyladenosine-3'-phosphate
  modified_base 16: mod_base = OTHER; note = 2'-deoxy-2'-fluorouridine-3'-phosphate
  modified_base 17: mod_base = OTHER; note = 2'-O-methyluridine-3'-phosphate
  modified_base 18: mod_base = OTHER; note = 2'-deoxy-2'-fluorocytidine-3'-phosphate
  modified_base 19: mod_base = OTHER; note = 2'-O-methylcytidine-3'-phosphate
  modified_base 20: mod_base = OTHER; note = 2'-O-methyladenosine-3'-phosphorothioate
  modified_base 21: mod_base = OTHER; note = 2'-deoxy-2'-fluorouridine
atgtaaccaagagtattccat

SEQ ID NO: 27 - DNA, 21 bp, synthetic construct
  source 1..21: mol_type = other DNA
  modified_base 3: mod_base = OTHER; note = 2'-O-methylguanosine-3'-phosphate
  modified_base 4: mod_base = OTHER; note = 2'-O-methylguanosine-3'-phosphate
  modified_base 7: mod_base = OTHER; note = 2'-O-methyluridine-3'-phosphate
  modified_base 8: mod_base = OTHER; note = 2'-O-methyluridine-3'-phosphate
  modified_base 11: mod_base = OTHER; note = 2'-O-methyluridine-3'-phosphate
  modified_base 12: mod_base = OTHER; note = 2'-O-methylguanosine-3'-phosphate
  modified_base 15: mod_base = OTHER; note = 2'-O-methyladenosine-3'-phosphate
  modified_base 16: mod_base = OTHER; note = 2'-O-methylcytidine-3'-phosphate
  modified_base 19: mod_base = OTHER; note = 2'-O-methyladenosine-3'-phosphate
  modified_base 20: mod_base = OTHER; note = 2'-O-methylguanosine-3'-phosphorothioate
  misc_feature 3..4: note = RNA
  misc_feature 7..8: note = RNA
  misc_feature 11..12: note = RNA
  misc_feature 15..16: note = RNA
  misc_feature 19..20: note = RNA
  misc_feature 1..2: note = DNA
  misc_feature 5..6: note = DNA
  misc_feature 9..10: note = DNA
  misc_feature 13..14: note = DNA
  misc_feature 17..18: note = DNA
  misc_feature 21: note = DNA
tgggatttcatgtaaccaaga

SEQ ID NO: 28 - RNA, 21 nt, synthetic construct
  source 1..21: mol_type = other RNA
  modified_base 1: mod_base = OTHER; note = 2'-deoxy-2'-fluoroadenosine-3'-phosphorothioate
  modified_base 2: mod_base = OTHER; note = 2'-O-methyluridine-3'-phosphate
  modified_base 3: mod_base = OTHER; note = 2'-deoxy-2'-fluoroguanosine-3'-phosphate
  modified_base 4: mod_base = OTHER; note = 2'-O-methyluridine-3'-phosphate
  modified_base 5: mod_base = OTHER; note = 2'-deoxy-2'-fluoroadenosine-3'-phosphate
  modified_base 6: mod_base = OTHER; note = 2'-O-methyladenosine-3'-phosphate
  modified_base 7: mod_base = OTHER; note = 2'-deoxy-2'-fluorocytidine-3'-phosphate
  modified_base 8: mod_base = OTHER; note = 2'-O-methylcytidine-3'-phosphate
  modified_base 9: mod_base = OTHER; note = 2'-deoxy-2'-fluoroadenosine-3'-phosphate
  modified_base 10: mod_base = OTHER; note = 2'-deoxy-2'-fluoroadenosine-3'-phosphate
  modified_base 11: mod_base = OTHER; note = 2'-deoxy-2'-fluoroguanosine-3'-phosphate
  modified_base 12: mod_base = OTHER; note = 2'-O-methyladenosine-3'-phosphate
  modified_base 13: mod_base = OTHER; note = 2'-deoxy-2'-fluoroguanosine-3'-phosphate
  modified_base 14: mod_base = OTHER; note = 2'-O-methyluridine-3'-phosphate
  modified_base 15: mod_base = OTHER; note = 2'-deoxy-2'-fluoroadenosine-3'-phosphate
  modified_base 16: mod_base = OTHER; note = 2'-O-methyluridine-3'-phosphate
  modified_base 17: mod_base = OTHER; note = 2'-O-methyluridine-3'-phosphate
  modified_base 18: mod_base = OTHER; note = 2'-O-methylcytidine-3'-phosphate
  modified_base 19: mod_base = OTHER; note = 2'-deoxy-2'-fluorocytidine-3'-phosphate
  modified_base 20: mod_base = OTHER; note = 2'-O-methyladenosine-3'-phosphorothioate
  modified_base 21: mod_base = OTHER; note = 2'-deoxy-2'-fluorouridine
atgtaaccaagagtattccat

SEQ ID NO: 29 - RNA, 21 nt, synthetic construct
  source 1..21: mol_type = other RNA
  modified_base 1: mod_base = OTHER; note = 2'-deoxy-2'-fluorouridine-3'-phosphate
  modified_base 2: mod_base = OTHER; note = 2'-O-methylguanosine-3'-phosphate
  modified_base 3: mod_base = OTHER; note = 2'-deoxy-2'-fluoroguanosine-3'-phosphate
  modified_base 4: mod_base = OTHER; note = 2'-O-methylguanosine-3'-phosphate
  modified_base 5: mod_base = OTHER; note = 2'-deoxy-2'-fluoroadenosine-3'-phosphate
  modified_base 6: mod_base = OTHER; note = 2'-O-methyluridine-3'-phosphate
  modified_base 7: mod_base = OTHER; note = 2'-deoxy-2'-fluorouridine-3'-phosphate
  modified_base 8: mod_base = OTHER; note = 2'-O-methyluridine-3'-phosphate
  modified_base 9: mod_base = OTHER; note = 2'-deoxy-2'-fluorocytidine-3'-phosphate
  modified_base 10: mod_base = OTHER; note = 2'-deoxy-2'-fluoroadenosine-3'-phosphate
  modified_base 11: mod_base = OTHER; note = 2'-deoxy-2'-fluorouridine-3'-phosphate
  modified_base 12: mod_base = OTHER; note = 2'-O-methylguanosine-3'-phosphate
  modified_base 13: mod_base = OTHER; note = 2'-O-methyluridine-3'-phosphate
  modified_base 14: mod_base = OTHER; note = 2'-O-methyladenosine-3'-phosphate
  modified_base 15: mod_base = OTHER; note = 2'-deoxy-2'-fluoroadenosine-3'-phosphate
  modified_base 16: mod_base = OTHER; note = 2'-O-methylcytidine-3'-phosphate
  modified_base 17: mod_base = OTHER; note = 2'-deoxy-2'-fluorocytidine-3'-phosphate
  modified_base 18: mod_base = OTHER; note = 2'-O-methyladenosine-3'-phosphate
  modified_base 19: mod_base = OTHER; note = 2'-deoxy-2'-fluoroadenosine-3'-phosphate
  modified_base 20: mod_base = OTHER; note = 2'-O-methylguanosine-3'-phosphorothioate
  modified_base 21: mod_base = OTHER; note = 2'-deoxy-2'-fluoroadenosine
tgggatttcatgtaaccaaga

SEQ ID NO: 30 - RNA, 21 nt, synthetic construct
  source 1..21: mol_type = other RNA
  modified_base 1: mod_base = OTHER; note = 2'-deoxy-2'-fluorouridine-3'-phosphate
  modified_base 2: mod_base = OTHER; note = 2'-O-methylguanosine-3'-phosphate
  modified_base 3: mod_base = OTHER; note = 2'-deoxy-2'-fluoroguanosine-3'-phosphate
  modified_base 4: mod_base = OTHER; note = 2'-O-methylguanosine-3'-phosphate
  modified_base 5: mod_base = OTHER; note = 2'-deoxy-2'-fluoroadenosine-3'-phosphate
  modified_base 6: mod_base = OTHER; note = 2'-O-methyluridine-3'-phosphate
  modified_base 7: mod_base = OTHER; note = 2'-deoxy-2'-fluorouridine-3'-phosphate
  modified_base 8: mod_base = OTHER; note = 2'-O-methyluridine-3'-phosphate
  modified_base 9: mod_base = OTHER; note = 2'-deoxy-2'-fluorocytidine-3'-phosphate
  modified_base 10: mod_base = OTHER; note = 2'-deoxy-2'-fluoroadenosine-3'-phosphate
  modified_base 11: mod_base = OTHER; note = 2'-deoxy-2'-fluorouridine-3'-phosphate
  modified_base 12: mod_base = OTHER; note = 2'-O-methylguanosine-3'-phosphate
  modified_base 13: mod_base = OTHER; note = 2'-deoxy-2'-fluorouridine-3'-phosphate
  modified_base 14: mod_base = OTHER; note = 2'-deoxy-2'-fluoroadenosine-3'-phosphate
  modified_base 15: mod_base = OTHER; note = 2'-deoxy-2'-fluoroadenosine-3'-phosphate
  modified_base 16: mod_base = OTHER; note = 2'-O-methylcytidine-3'-phosphate
  modified_base 17: mod_base = OTHER; note = 2'-deoxy-2'-fluorocytidine-3'-phosphate
  modified_base 18: mod_base = OTHER; note = 2'-O-methyladenosine-3'-phosphate
  modified_base 19: mod_base = OTHER; note = 2'-deoxy-2'-fluoroadenosine-3'-phosphate
  modified_base 20: mod_base = OTHER; note = 2'-O-methylguanosine-3'-phosphorothioate
  modified_base 21: mod_base = OTHER; note = 2'-deoxy-2'-fluoroadenosine
tgggatttcatgtaaccaaga

SEQ ID NO: 31 - RNA, 21 nt, synthetic construct
  source 1..21: mol_type = other RNA
  modified_base 1: mod_base = OTHER; note = 2'-deoxy-2'-fluorouridine-3'-phosphate
  modified_base 2: mod_base = OTHER; note = 2'-O-methylguanosine-3'-phosphate
  modified_base 3: mod_base = OTHER; note = 2'-deoxy-2'-fluoroguanosine-3'-phosphate
  modified_base 4: mod_base = OTHER; note = 2'-O-methylguanosine-3'-phosphate
  modified_base 5: mod_base = OTHER; note = 2'-deoxy-2'-fluoroadenosine-3'-phosphate
  modified_base 6: mod_base = OTHER; note = 2'-O-methyluridine-3'-phosphate
  modified_base 7: mod_base = OTHER; note = 2'-deoxy-2'-fluorouridine-3'-phosphate
  modified_base 8: mod_base = OTHER; note = 2'-O-methyluridine-3'-phosphate
  modified_base 9: mod_base = OTHER; note = 2'-deoxy-2'-fluorocytidine-3'-phosphate
  modified_base 10: mod_base = OTHER; note = 2'-deoxy-2'-fluoroadenosine-3'-phosphate
  modified_base 11: mod_base = OTHER; note = 2'-deoxy-2'-fluorouridine-3'-phosphate
  modified_base 12: mod_base = OTHER; note = 2'-O-methylguanosine-3'-phosphate
  modified_base 13: mod_base = OTHER; note = 2'-deoxy-2'-fluorouridine-3'-phosphate
  modified_base 14: mod_base = OTHER; note = 2'-O-methyladenosine-3'-phosphate
  modified_base 15: mod_base = OTHER; note = 2'-deoxy-2'-fluoroadenosine-3'-phosphate
  modified_base 16: mod_base = OTHER; note = 2'-O-methylcytidine-3'-phosphate
  modified_base 17: mod_base = OTHER; note = 2'-deoxy-2'-fluorocytidine-3'-phosphate
  modified_base 18: mod_base = OTHER; note = 2'-O-methyladenosine-3'-phosphate
  modified_base 19: mod_base = OTHER; note = 2'-deoxy-2'-fluoroadenosine-3'-phosphate
  modified_base 20: mod_base = OTHER; note = 2'-O-methylguanosine-3'-phosphorothioate
  modified_base 21: mod_base = OTHER; note = 2'-deoxy-2'-fluoroadenosine
tgggatttcatgtaaccaaga

SEQ ID NO: 32 - RNA, 21 nt, synthetic construct
  source 1..21: mol_type = other RNA
  modified_base 1: mod_base = OTHER; note = 2'-deoxy-2'-fluorouridine-3'-phosphate
  modified_base 2: mod_base = OTHER; note = 2'-O-methylguanosine-3'-phosphate
  modified_base 3: mod_base = OTHER; note = 2'-deoxy-2'-fluoroguanosine-3'-phosphate
  modified_base 4: mod_base = OTHER; note = 2'-O-methylguanosine-3'-phosphate
  modified_base 5: mod_base = OTHER; note = 2'-deoxy-2'-fluoroadenosine-3'-phosphate
  modified_base 6: mod_base = OTHER; note = 2'-O-methyluridine-3'-phosphate
  modified_base 7: mod_base = OTHER; note = 2'-deoxy-2'-fluorouridine-3'-phosphate
  modified_base 8: mod_base = OTHER; note = 2'-O-methyluridine-3'-phosphate
  modified_base 9: mod_base = OTHER; note = 2'-deoxy-2'-fluorocytidine-3'-phosphate
  modified_base 10: mod_base = OTHER; note = 2'-deoxy-2'-fluoroadenosine-3'-phosphate
  modified_base 11: mod_base = OTHER; note = 2'-deoxy-2'-fluorouridine-3'-phosphate
  modified_base 12: mod_base = OTHER; note = 2'-O-methylguanosine-3'-phosphate
  modified_base 13: mod_base = OTHER; note = 2'-deoxy-2'-fluorouridine-3'-phosphate
  modified_base 14: mod_base = OTHER; note = 2'-O-methyladenosine-3'-phosphate
  modified_base 15: mod_base = OTHER; note = 2'-deoxy-2'-fluoroadenosine-3'-phosphate
  modified_base 16: mod_base = OTHER; note = 2'-O-methylcytidine-3'-phosphate
  modified_base 17: mod_base = OTHER; note = 2'-O-methylcytidine-3'-phosphate
  modified_base 18: mod_base = OTHER; note = 2'-O-methyladenosine-3'-phosphate
  modified_base 19: mod_base = OTHER; note = 2'-deoxy-2'-fluoroadenosine-3'-phosphate
  modified_base 20: mod_base = OTHER; note = 2'-O-methylguanosine-3'-phosphorothioate
  modified_base 21: mod_base = OTHER; note = 2'-deoxy-2'-fluoroadenosine
tgggatttcatgtaaccaaga

SEQ ID NO: 33 - DNA, 21 bp, synthetic construct
  source 1..21: mol_type = other DNA
  modified_base 3: mod_base = OTHER; note = 2'-O-methylguanosine-3'-phosphate
  modified_base 4: mod_base = OTHER; note = 2'-O-methyluridine-3'-phosphate
  modified_base 7: mod_base = OTHER; note = 2'-O-methylcytidine-3'-phosphate
  modified_base 8: mod_base = OTHER; note = 2'-O-methylcytidine-3'-phosphate
  modified_base 11: mod_base = OTHER; note = 2'-O-methylguanosine-3'-phosphate
  modified_base 12: mod_base = OTHER; note = 2'-O-methyladenosine-3'-phosphate
  modified_base 15: mod_base = OTHER; note = 2'-O-methyladenosine-3'-phosphate
  modified_base 16: mod_base = OTHER; note = 2'-O-methyluridine-3'-phosphate
  modified_base 19: mod_base = OTHER; note = 2'-O-methylcytidine-3'-phosphate
  modified_base 20: mod_base = OTHER; note = 2'-O-methyladenosine-3'-phosphorothioate
  misc_feature 3..4: note = RNA
  misc_feature 7..8: note = RNA
  misc_feature 11..12: note = RNA
  misc_feature 15..16: note = RNA
  misc_feature 19..20: note = RNA
  misc_feature 1..2: note = DNA
  misc_feature 5..6: note = DNA
  misc_feature 9..10: note = DNA
  misc_feature 13..14: note = DNA
  misc_feature 17..18: note = DNA
  misc_feature 21: note = DNA
atgtaaccaagagtattccat

SEQ ID NO: 34 - DNA, 21 bp, synthetic construct
  source 1..21: mol_type = other DNA
  modified_base 1: mod_base = OTHER; note = adenosine-3'-phosphate
  modified_base 3: mod_base = OTHER; note = guanosine-3'-phosphate
  modified_base 5: mod_base = OTHER; note = adenosine-3'-phosphate
  modified_base 7: mod_base = OTHER; note = cytidine-3'-phosphate
  modified_base 9: mod_base = OTHER; note = adenosine-3'-phosphate
  modified_base 11: mod_base = OTHER; note = guanosine-3'-phosphate
  modified_base 13: mod_base = OTHER; note = guanosine-3'-phosphate
  modified_base 15: mod_base = OTHER; note = adenosine-3'-phosphate
  modified_base 17: mod_base = OTHER; note = uridine-3'-phosphate
  modified_base 19: mod_base = OTHER; note = cytidine-3'-phosphate
  modified_base 20: mod_base = OTHER; note = 2'-deoxyadenosine-3'-phosphorothioate
  modified_base 21: mod_base = OTHER; note = uridine
  misc_feature 1: note = RNA
  misc_feature 3: note = RNA
  misc_feature 5: note = RNA
  misc_feature 7: note = RNA
  misc_feature 9: note = RNA
  misc_feature 11: note = RNA
  misc_feature 13: note = RNA
  misc_feature 15: note = RNA
  misc_feature 17: note = RNA
  misc_feature 19: note = RNA
  misc_feature 21: note = RNA
  misc_feature 2: note = DNA
  misc_feature 4: note = DNA
  misc_feature 6: note = DNA
  misc_feature 8: note = DNA
  misc_feature 10: note = DNA
  misc_feature 12: note = DNA
  misc_feature 14: note = DNA
  misc_feature 16: note = DNA
  misc_feature 18: note = DNA
  misc_feature 20: note = DNA
atgtaaccaagagtattccat

SEQ ID NO: 35 - RNA, 21 nt, synthetic construct
  source 1..21: mol_type = other RNA
  modified_base 1: mod_base = OTHER; note = 2'-deoxy-2'-fluorouridine-3'-phosphate
  modified_base 2: mod_base = OTHER; note = 2'-O-methylguanosine-3'-phosphate
  modified_base 3: mod_base = OTHER; note = 2'-deoxy-2'-fluoroguanosine-3'-phosphate
  modified_base 4: mod_base = OTHER; note = 2'-deoxy-2'-fluoroguanosine-3'-phosphate
  modified_base 5: mod_base = OTHER; note = 2'-deoxy-2'-fluoroadenosine-3'-phosphate
  modified_base 6: mod_base = OTHER; note = 2'-O-methyluridine-3'-phosphate
  modified_base 7: mod_base = OTHER; note = 2'-O-methyluridine-3'-phosphate
  modified_base 8: mod_base = OTHER; note = 2'-O-methyluridine-3'-phosphate
  modified_base 9: mod_base = OTHER; note = 2'-deoxy-2'-fluorocytidine-3'-phosphate
  modified_base 10: mod_base = OTHER; note = 2'-deoxy-2'-fluoroadenosine-3'-phosphate
  modified_base 11: mod_base = OTHER; note = 2'-deoxy-2'-fluorouridine-3'-phosphate
  modified_base 12: mod_base = OTHER; note = 2'-O-methylguanosine-3'-phosphate
  modified_base 13: mod_base = OTHER; note = 2'-deoxy-2'-fluorouridine-3'-phosphate
  modified_base 14: mod_base = OTHER; note = 2'-O-methyladenosine-3'-phosphate
  modified_base 15: mod_base = OTHER; note = 2'-deoxy-2'-fluoroadenosine-3'-phosphate
  modified_base 16: mod_base = OTHER; note = 2'-O-methylcytidine-3'-phosphate
  modified_base 17: mod_base = OTHER; note = 2'-deoxy-2'-fluorocytidine-3'-phosphate
  modified_base 18: mod_base = OTHER; note = 2'-O-methyladenosine-3'-phosphate
  modified_base 19: mod_base = OTHER; note = 2'-deoxy-2'-fluoroadenosine-3'-phosphate
  modified_base 20: mod_base = OTHER; note = 2'-O-methylguanosine-3'-phosphorothioate
  modified_base 21: mod_base = OTHER; note = 2'-deoxy-2'-fluoroadenosine
tgggatttcatgtaaccaaga

SEQ ID NO: 36 - RNA, 21 nt, synthetic construct
  source 1..21: mol_type = other RNA
  modified_base 1: mod_base = OTHER; note = 2'-deoxy-2'-fluoroadenosine-3'-phosphate
  modified_base 2: mod_base = OTHER; note = 2'-O-methyluridine-3'-phosphate
  modified_base 3: mod_base = OTHER; note = 2'-deoxy-2'-fluoroguanosine-3'-phosphate
  modified_base 4: mod_base = OTHER; note = 2'-O-methyluridine-3'-phosphate
  modified_base 5: mod_base = OTHER; note = 2'-deoxy-2'-fluoroadenosine-3'-phosphate
  modified_base 6: mod_base = OTHER; note = 2'-deoxy-2'-fluoroadenosine-3'-phosphate
  modified_base 7: mod_base = OTHER; note = 2'-O-methylcytidine-3'-phosphate
  modified_base 8: mod_base = OTHER; note = 2'-O-methylcytidine-3'-phosphate
  modified_base 9: mod_base = OTHER; note = 2'-deoxy-2'-fluoroadenosine-3'-phosphate
  modified_base 10: mod_base = OTHER; note = 2'-deoxy-2'-fluoroadenosine-3'-phosphate
  modified_base 11: mod_base = OTHER; note = 2'-deoxy-2'-fluoroguanosine-3'-phosphate
  modified_base 12: mod_base = OTHER; note = 2'-deoxy-2'-fluoroadenosine-3'-phosphate
  modified_base 13: mod_base = OTHER; note = 2'-deoxy-2'-fluoroguanosine-3'-phosphate
  modified_base 14: mod_base = OTHER; note = 2'-O-methyluridine-3'-phosphate
  modified_base 15: mod_base = OTHER; note = 2'-deoxy-2'-fluoroadenosine-3'-phosphate
  modified_base 16: mod_base = OTHER; note = 2'-O-methyluridine-3'-phosphate
  modified_base 17: mod_base = OTHER; note = 2'-O-methyluridine-3'-phosphate
  modified_base 18: mod_base = OTHER; note = 2'-O-methylcytidine-3'-phosphate
  modified_base 19: mod_base = OTHER; note = 2'-O-methylcytidine-3'-phosphate
  modified_base 20: mod_base = OTHER; note = 2'-deoxy-2'-fluoroadenosine-3'-phosphorothioate
  modified_base 21: mod_base = OTHER; note = 2'-O-methyluridine
atgtaaccaagagtattccat

SEQ ID NO: 37 - RNA, 21 nt, synthetic construct
  source 1..21: mol_type = other RNA
  modified_base 1: mod_base = OTHER; note = 2'-deoxy-2'-fluoroadenosine-3'-phosphorothioate
  modified_base 2: mod_base = OTHER; note = 2'-O-methyluridine-3'-phosphate
  modified_base 3: mod_base = OTHER; note = 2'-deoxy-2'-fluoroguanosine-3'-phosphate
  modified_base 4: mod_base = OTHER; note = 2'-O-methyluridine-3'-phosphate
  modified_base 5: mod_base = OTHER; note = 2'-deoxy-2'-fluoroadenosine-3'-phosphate
  modified_base 6: mod_base = OTHER; note = 2'-O-methyladenosine-3'-phosphate
  modified_base 7: mod_base = OTHER; note = 2'-deoxy-2'-fluorocytidine-3'-phosphate
  modified_base 8: mod_base = OTHER; note = 2'-O-methylcytidine-3'-phosphate
  modified_base 9: mod_base = OTHER; note = 2'-deoxy-2'-fluoroadenosine-3'-phosphate
  modified_base 10: mod_base = OTHER; note = 2'-deoxy-2'-fluoroadenosine-3'-phosphate
  modified_base 11: mod_base = OTHER; note = 2'-deoxy-2'-fluoroguanosine-3'-phosphate
  modified_base 12: mod_base = OTHER; note = 2'-O-methyladenosine-3'-phosphate
  modified_base 13: mod_base = OTHER; note = 2'-deoxy-2'-fluoroguanosine-3'-phosphate
  modified_base 14: mod_base = OTHER; note = 2'-O-methyluridine-3'-phosphate
  modified_base 15: mod_base = OTHER; note = 2'-deoxy-2'-fluoroadenosine-3'-phosphate
  modified_base 16: mod_base = OTHER; note = 2'-O-methyluridine-3'-phosphate
  modified_base 17: mod_base = OTHER; note = 2'-O-methyluridine-3'-phosphate
  modified_base 18: mod_base = OTHER; note = 2'-O-methylcytidine-3'-phosphate
  modified_base 19: mod_base = OTHER; note = 2'-deoxy-2'-fluorocytidine-3'-phosphate
  modified_base 20: mod_base = OTHER; note = 2'-O-methyladenosine-3'-phosphorothioate
  modified_base 21: mod_base = OTHER; note = 2'-deoxy-2'-fluorouridine
atgtaaccaagagtattccat

SEQ ID NO: 38 - RNA, 21 nt, synthetic construct
  source 1..21: mol_type = other RNA
  modified_base 1: mod_base = OTHER; note = 2'-deoxy-2'-fluorouridine-3'-phosphate
  modified_base 2: mod_base = OTHER; note = 2'-O-methylguanosine-3'-phosphate
  modified_base 3: mod_base = OTHER; note = 2'-deoxy-2'-fluoroguanosine-3'-phosphate
  modified_base 4: mod_base = OTHER; note = 2'-O-methylguanosine-3'-phosphate
  modified_base 5: mod_base = OTHER; note = 2'-deoxy-2'-fluoroadenosine-3'-phosphate
  modified_base 6: mod_base = OTHER; note = 2'-O-methyluridine-3'-phosphate
  modified_base 7: mod_base = OTHER; note = 2'-deoxy-2'-fluorouridine-3'-phosphate
  modified_base 8: mod_base = OTHER; note = 2'-O-methyluridine-3'-phosphate
  modified_base 9: mod_base = OTHER; note = 2'-deoxy-2'-fluorocytidine-3'-phosphate
  modified_base 10: mod_base = OTHER; note = 2'-O-methyladenosine-3'-phosphate
  modified_base 11: mod_base = OTHER; note = 2'-deoxy-2'-fluorouridine-3'-phosphate
  modified_base 12: mod_base = OTHER; note = 2'-deoxy-2'-fluoroguanosine-3'-phosphate
  modified_base 13: mod_base = OTHER; note = 2'-deoxy-2'-fluorouridine-3'-phosphate
  modified_base 14: mod_base = OTHER; note = 2'-O-methyladenosine-3'-phosphate
  modified_base 15: mod_base = OTHER; note = 2'-O-methyladenosine-3'-phosphate
  modified_base 16: mod_base = OTHER; note = 2'-O-methylcytidine-3'-phosphate
  modified_base 17: mod_base = OTHER; note = 2'-deoxy-2'-fluorocytidine-3'-phosphate
  modified_base 18: mod_base = OTHER; note = 2'-O-methyladenosine-3'-phosphate
  modified_base 19: mod_base = OTHER; note = 2'-deoxy-2'-fluoroadenosine-3'-phosphate
  modified_base 20: mod_base = OTHER; note = 2'-O-methylguanosine-3'-phosphorothioate
  modified_base 21: mod_base = OTHER; note = 2'-deoxy-2'-fluoroadenosine
tgggatttcatgtaaccaaga

SEQ ID NO: 39 - RNA, 21 nt, synthetic construct
  source 1..21: mol_type = other RNA
  modified_base 1: mod_base = OTHER; note = 2'-deoxy-2'-fluoroadenosine-3'-phosphate
  modified_base 2: mod_base = OTHER; note = 2'-O-methyluridine-3'-phosphate
  modified_base 3: mod_base = OTHER; note = 2'-deoxy-2'-fluoroguanosine-3'-phosphate
  modified_base 4: mod_base = OTHER; note = 2'-O-methyluridine-3'-phosphate
  modified_base 5: mod_base = OTHER; note = 2'-deoxy-2'-fluoroadenosine-3'-phosphate
  modified_base 6: mod_base = OTHER; note = 2'-deoxy-2'-fluoroadenosine-3'-phosphate
  modified_base 7: mod_base = OTHER; note = 2'-O-methylcytidine-3'-phosphate
  modified_base 8: mod_base = OTHER; note = 2'-O-methylcytidine-3'-phosphate
  modified_base 9: mod_base = OTHER; note = 2'-deoxy-2'-fluoroadenosine-3'-phosphate
  modified_base 10: mod_base = OTHER; note = 2'-O-methyladenosine-3'-phosphate
  modified_base 11: mod_base = OTHER; note = 2'-deoxy-2'-fluoroguanosine-3'-phosphate
  modified_base 12: mod_base = OTHER; note = 2'-O-methyladenosine-3'-phosphate
  modified_base 13: mod_base = OTHER; note = 2'-deoxy-2'-fluoroguanosine-3'-phosphate
  modified_base 14: mod_base = OTHER; note = 2'-O-methyluridine-3'-phosphate
  modified_base 15: mod_base = OTHER; note = 2'-deoxy-2'-fluoroadenosine-3'-phosphate
  modified_base 16: mod_base = OTHER; note = 2'-O-methyluridine-3'-phosphate
  modified_base 17: mod_base = OTHER; note = 2'-deoxy-2'-fluorouridine-3'-phosphate
  modified_base 18: mod_base = OTHER; note = 2'-O-methylcytidine-3'-phosphate
  modified_base 19: mod_base = OTHER; note = 2'-deoxy-2'-fluorocytidine-3'-phosphate
  modified_base 20: mod_base = OTHER; note = 2'-O-methyladenosine-3'-phosphorothioate
  modified_base 21: mod_base = OTHER; note = 2'-deoxy-2'-fluorouridine
atgtaaccaagagtattccat

SEQ ID NO: 40 - RNA, 21 nt, synthetic construct
  source 1..21: mol_type = other RNA
  modified_base 1: mod_base = OTHER; note = 2'-deoxy-2'-fluorouridine-3'-phosphate
  modified_base 2: mod_base = OTHER; note = 2'-O-methylguanosine-3'-phosphate
  modified_base 3: mod_base = OTHER; note = 2'-deoxy-2'-fluoroguanosine-3'-phosphate
  modified_base 4: mod_base = OTHER; note = 2'-O-methylguanosine-3'-phosphate
  modified_base 5: mod_base = OTHER; note = 2'-deoxy-2'-fluoroadenosine-3'-phosphate
  modified_base 6: mod_base = OTHER; note = 2'-O-methyluridine-3'-phosphate
  modified_base 7: mod_base = OTHER; note = 2'-O-methyluridine-3'-phosphate
  modified_base 8: mod_base = OTHER; note = 2'-O-methyluridine-3'-phosphate
  modified_base 9: mod_base = OTHER; note = 2'-deoxy-2'-fluorocytidine-3'-phosphate
  modified_base 10: mod_base = OTHER; note = 2'-deoxy-2'-fluoroadenosine-3'-phosphate
  modified_base 11: mod_base = OTHER; note = 2'-deoxy-2'-fluorouridine-3'-phosphate
  modified_base 12: mod_base = OTHER; note = 2'-O-methylguanosine-3'-phosphate
  modified_base 13: mod_base = OTHER; note = 2'-deoxy-2'-fluorouridine-3'-phosphate
  modified_base 14: mod_base = OTHER; note = 2'-O-methyladenosine-3'-phosphate
  modified_base 15: mod_base = OTHER; note = 2'-deoxy-2'-fluoroadenosine-3'-phosphate
  modified_base 16: mod_base = OTHER; note = 2'-O-methylcytidine-3'-phosphate
  modified_base 17: mod_base = OTHER; note = 2'-deoxy-2'-fluorocytidine-3'-phosphate
  modified_base 18: mod_base = OTHER; note = 2'-O-methyladenosine-3'-phosphate
  modified_base 19: mod_base = OTHER; note = 2'-deoxy-2'-fluoroadenosine-3'-phosphate
  modified_base 20: mod_base = OTHER; note = 2'-O-methylguanosine-3'-phosphorothioate
  modified_base 21: mod_base = OTHER; note = 2'-deoxy-2'-fluoroadenosine
tgggatttcatgtaaccaaga

SEQ ID NO: 41 - RNA, 21 nt, synthetic construct
  source 1..21: mol_type = other RNA
  modified_base 1: mod_base = OTHER; note = 2'-deoxy-2'-fluorouridine-3'-phosphate
  modified_base 2: mod_base = OTHER; note = 2'-O-methylguanosine-3'-phosphate
  modified_base 3: mod_base = OTHER; note = 2'-deoxy-2'-fluoroguanosine-3'-phosphate
  modified_base 4: mod_base = OTHER; note = 2'-deoxy-2'-fluoroguanosine-3'-phosphate
  modified_base 5: mod_base = OTHER; note = 2'-deoxy-2'-fluoroadenosine-3'-phosphate
  modified_base 6: mod_base = OTHER; note = 2'-O-methyluridine-3'-phosphate
  modified_base 7: mod_base = OTHER; note = 2'-deoxy-2'-fluorouridine-3'-phosphate
  modified_base 8: mod_base = OTHER; note = 2'-O-methyluridine-3'-phosphate
  modified_base 9: mod_base = OTHER; note = 2'-deoxy-2'-fluorocytidine-3'-phosphate
  modified_base 10: mod_base = OTHER; note = 2'-O-methyladenosine-3'-phosphate
  modified_base 11: mod_base = OTHER; note = 2'-deoxy-2'-fluorouridine-3'-phosphate
  modified_base 12: mod_base = OTHER; note = 2'-O-methylguanosine-3'-phosphate
  modified_base 13: mod_base = OTHER; note = 2'-deoxy-2'-fluorouridine-3'-phosphate
  modified_base 14: mod_base = OTHER; note = 2'-O-methyladenosine-3'-phosphate
  modified_base 15: mod_base = OTHER; note = 2'-deoxy-2'-fluoroadenosine-3'-phosphate
  modified_base 16: mod_base = OTHER; note = 2'-O-methylcytidine-3'-phosphate
  modified_base 17: mod_base = OTHER; note = 2'-deoxy-2'-fluorocytidine-3'-phosphate
  modified_base 18: mod_base = OTHER; note = 2'-deoxy-2'-fluoroadenosine-3'-phosphate
  modified_base 19: mod_base = OTHER; note = 2'-deoxy-2'-fluoroadenosine-3'-phosphate
  modified_base 20: mod_base = OTHER; note = 2'-O-methylguanosine-3'-phosphorothioate
  modified_base 21: mod_base = OTHER; note = 2'-deoxy-2'-fluoroadenosine
tgggatttcatgtaaccaaga

SEQ ID NO: 42 - RNA, 21 nt, synthetic construct
  source 1..21: mol_type = other RNA
  modified_base 1: mod_base = OTHER; note = 2'-deoxy-2'-fluorouridine-3'-phosphate
  modified_base 2: mod_base = OTHER; note = 2'-O-methylguanosine-3'-phosphate
  modified_base 3: mod_base = OTHER; note = 2'-deoxy-2'-fluoroguanosine-3'-phosphate
  modified_base 4: mod_base = OTHER; note = 2'-deoxy-2'-fluoroguanosine-3'-phosphate
  modified_base 5: mod_base = OTHER; note = 2'-deoxy-2'-fluoroadenosine-3'-phosphate
  modified_base 6: mod_base = OTHER; note = 2'-O-methyluridine-3'-phosphate
  modified_base 7: mod_base = OTHER; note = 2'-deoxy-2'-fluorouridine-3'-phosphate
  modified_base 8: mod_base = OTHER; note = 2'-O-methyluridine-3'-phosphate
  modified_base 9: mod_base = OTHER; note = 2'-deoxy-2'-fluorocytidine-3'-phosphate
  modified_base 10: mod_base = OTHER; note = 2'-deoxy-2'-fluoroadenosine-3'-phosphate
  modified_base 11: mod_base = OTHER; note = 2'-deoxy-2'-fluorouridine-3'-phosphate
  modified_base 12: mod_base = OTHER; note = 2'-O-methylguanosine-3'-phosphate
  modified_base 13: mod_base = OTHER; note = 2'-deoxy-2'-fluorouridine-3'-phosphate
  modified_base 14: mod_base = OTHER; note = 2'-O-methyladenosine-3'-phosphate
  modified_base 15: mod_base = OTHER; note = 2'-deoxy-2'-fluoroadenosine-3'-phosphate
  modified_base 16: mod_base = OTHER; note = 2'-O-methylcytidine-3'-phosphate
  modified_base 17: mod_base = OTHER; note = 2'-deoxy-2'-fluorocytidine-3'-phosphate
  modified_base 18: mod_base = OTHER; note = 2'-O-methyladenosine-3'-phosphate
  modified_base 19: mod_base = OTHER; note = 2'-deoxy-2'-fluoroadenosine-3'-phosphate
  modified_base 20: mod_base = OTHER; note = 2'-O-methylguanosine-3'-phosphorothioate
  modified_base 21: mod_base = OTHER; note = 2'-deoxy-2'-fluoroadenosine
tgggatttcatgtaaccaaga

SEQ ID NO: 43 - RNA, 21 nt, synthetic construct
  source 1..21: mol_type = other RNA
  modified_base 1: mod_base = OTHER; note = 2'-deoxy-2'-fluorouridine-3'-phosphate
  modified_base 2: mod_base = OTHER; note = 2'-deoxy-2'-fluoroguanosine-3'-phosphate
  modified_base 3: mod_base = OTHER; note = 2'-O-methylguanosine-3'-phosphate
  modified_base 4: mod_base = OTHER; note = 2'-O-methylguanosine-3'-phosphate
  modified_base 5: mod_base = OTHER; note = 2'-deoxy-2'-fluoroadenosine-3'-phosphate
  modified_base 6: mod_base = OTHER; note = 2'-deoxy-2'-fluorouridine-3'-phosphate
  modified_base 7: mod_base = OTHER; note = 2'-O-methyluridine-3'-phosphate
  modified_base 8: mod_base = OTHER; note = 2'-O-methyluridine-3'-phosphate
  modified_base 9: mod_base = OTHER; note = 2'-deoxy-2'-fluorocytidine-3'-phosphate
  modified_base 10: mod_base = OTHER; note = 2'-deoxy-2'-fluoroadenosine-3'-phosphate
  modified_base 11: mod_base = OTHER; note = 2'-O-methyluridine-3'-phosphate
  modified_base 12: mod_base = OTHER; note = 2'-O-methylguanosine-3'-phosphate
  modified_base 13: mod_base = OTHER; note = 2'-deoxy-2'-fluorouridine-3'-phosphate
  modified_base 14: mod_base = OTHER; note = 2'-deoxy-2'-fluoroadenosine-3'-phosphate
  modified_base 15: mod_base = OTHER; note = 2'-O-methyladenosine-3'-phosphate
  modified_base 16: mod_base = OTHER; note = 2'-O-methylcytidine-3'-phosphate
  modified_base 17: mod_base = OTHER; note = 2'-deoxy-2'-fluorocytidine-3'-phosphate
  modified_base 18: mod_base = OTHER; note = 2'-deoxy-2'-fluoroadenosine-3'-phosphate
  modified_base 19: mod_base = OTHER; note = 2'-O-methyladenosine-3'-phosphate
  modified_base 20: mod_base = OTHER; note = 2'-O-methylguanosine-3'-phosphorothioate
  modified_base 21: mod_base = OTHER; note = 2'-deoxy-2'-fluoroadenosine
tgggatttcatgtaaccaaga

SEQ ID NO: 44 - RNA, 21 nt, synthetic construct
  source 1..21: mol_type = other RNA
  modified_base 1: mod_base = OTHER; note = 2'-deoxy-2'-fluoroadenosine-3'-phosphate
  modified_base 2: mod_base = OTHER; note = 2'-O-methyluridine-3'-phosphate
  modified_base 3: mod_base = OTHER; note = 2'-deoxy-2'-fluoroguanosine-3'-phosphate
  modified_base 4: mod_base = OTHER; note = 2'-O-methyluridine-3'-phosphate
  modified_base 5: mod_base = OTHER; note = 2'-deoxy-2'-fluoroadenosine-3'-phosphate
  modified_base 6: mod_base = OTHER; note = 2'-O-methyladenosine-3'-phosphate
  modified_base 7: mod_base = OTHER; note = 2'-deoxy-2'-fluorocytidine-3'-phosphate
  modified_base 8: mod_base = OTHER; note = 2'-O-methylcytidine-3'-phosphate
  modified_base 9: mod_base = OTHER; note = 2'-deoxy-2'-fluoroadenosine-3'-phosphate
  modified_base 10: mod_base = OTHER; note = 2'-deoxy-2'-fluoroadenosine-3'-phosphate
  modified_base 11: mod_base = OTHER; note = 2'-deoxy-2'-fluoroguanosine-3'-phosphate
  modified_base 12: mod_base = OTHER; note = 2'-O-methyladenosine-3'-phosphate
  modified_base 13: mod_base = OTHER; note = 2'-deoxy-2'-fluoroguanosine-3'-phosphate
  modified_base 14: mod_base = OTHER; note = 2'-O-methyluridine-3'-phosphate
  modified_base 15: mod_base = OTHER; note = 2'-deoxy-2'-fluoroadenosine-3'-phosphate
  modified_base 16: mod_base = OTHER; note = 2'-O-methyluridine-3'-phosphate
  modified_base 17: mod_base = OTHER; note = 2'-O-methyluridine-3'-phosphate
  modified_base 18: mod_base = OTHER; note = 2'-O-methylcytidine-3'-phosphate
  modified_base 19: mod_base = OTHER; note = 2'-deoxy-2'-fluorocytidine-3'-phosphate
  modified_base 20: mod_base = OTHER; note = 2'-O-methyladenosine-3'-phosphorothioate
  modified_base 21: mod_base = OTHER; note = 2'-deoxy-2'-fluorouridine
atgtaaccaagagtattccat

SEQ ID NO: 45 - RNA, 21 nt, synthetic construct
  source 1..21: mol_type = other RNA
  modified_base 1: mod_base = OTHER; note = 2'-deoxy-2'-fluoroadenosine-3'-phosphate
  modified_base 2: mod_base = OTHER; note = 2'-O-methyluridine-3'-phosphate
  modified_base 3: mod_base = OTHER; note = 2'-deoxy-2'-fluoroguanosine-3'-phosphate
  modified_base 4: mod_base = OTHER; note = 2'-O-methyluridine-3'-phosphate
  modified_base 5: mod_base = OTHER; note = 2'-deoxy-2'-fluoroadenosine-3'-phosphate
  modified_base 6: mod_base = OTHER; note = 2'-O-methyladenosine-3'-phosphate
  modified_base 7: mod_base = OTHER; note = 2'-deoxy-2'-fluorocytidine-3'-phosphate
  modified_base 8: mod_base = OTHER; note = 2'-O-methylcytidine-3'-phosphate
  modified_base 9: mod_base = OTHER; note = 2'-deoxy-2'-fluoroadenosine-3'-phosphate
  modified_base 10: mod_base = OTHER; note = 2'-deoxy-2'-fluoroadenosine-3'-phosphate
  modified_base 11: mod_base = OTHER; note = 2'-deoxy-2'-fluoroguanosine-3'-phosphate
  modified_base 12: mod_base = OTHER; note = 2'-O-methyladenosine-3'-phosphate
  modified_base 13: mod_base = OTHER; note = 2'-deoxy-2'-fluoroguanosine-3'-phosphate
  modified_base 14: mod_base = OTHER; note = 2'-O-methyluridine-3'-phosphate
  modified_base 15: mod_base = OTHER; note = 2'-deoxy-2'-fluoroadenosine-3'-phosphate
  modified_base 16: mod_base = OTHER; note = 2'-O-methyluridine-3'-phosphate
  modified_base 17: mod_base = OTHER; note = 2'-deoxy-2'-fluorouridine-3'-phosphate
  modified_base 18: mod_base = OTHER; note = 2'-O-methylcytidine-3'-phosphate
  modified_base 19: mod_base = OTHER; note = 2'-O-methylcytidine-3'-phosphate
  modified_base 20: mod_base = OTHER; note = 2'-O-methyladenosine-3'-phosphorothioate
  modified_base 21: mod_base = OTHER; note = 2'-deoxy-2'-fluorouridine
atgtaaccaagagtattccat

SEQ ID NO: 46 - RNA, 21 nt, synthetic construct
  source 1..21: mol_type = other RNA
  modified_base 1: mod_base = OTHER; note = 2'-deoxy-2'-fluoroadenosine-3'-phosphorothioate
  modified_base 2: mod_base = OTHER; note = 2'-O-methyluridine-3'-phosphate
  modified_base 3: mod_base = OTHER; note = 2'-deoxy-2'-fluoroguanosine-3'-phosphate
  modified_base 4: mod_base = OTHER; note = 2'-O-methyluridine-3'-phosphate
  modified_base 5: mod_base = OTHER; note = 2'-deoxy-2'-fluoroadenosine-3'-phosphate
  modified_base 6: mod_base = OTHER; note = 2'-O-methyladenosine-3'-phosphate
  modified_base 7: mod_base = OTHER; note = 2'-deoxy-2'-fluorocytidine-3'-phosphate
  modified_base 8: mod_base = OTHER; note = 2'-O-methylcytidine-3'-phosphate
  modified_base 9: mod_base = OTHER; note = 2'-deoxy-2'-fluoroadenosine-3'-phosphate
  modified_base 10: mod_base = OTHER; note = 2'-deoxy-2'-fluoroadenosine-3'-phosphate
  modified_base 11: mod_base = OTHER; note = 2'-deoxy-2'-fluoroguanosine-3'-phosphate
  modified_base 12: mod_base = OTHER; note = 2'-O-methyladenosine-3'-phosphate
  modified_base 13: mod_base = OTHER; note = 2'-deoxy-2'-fluoroguanosine-3'-phosphate
  modified_base 14: mod_base = OTHER; note = 2'-O-methyluridine-3'-phosphate
  modified_base 15: mod_base = OTHER; note = 2'-deoxy-2'-fluoroadenosine-3'-phosphate
  modified_base 16: mod_base = OTHER; note = 2'-O-methyluridine-3'-phosphate
  modified_base 17: mod_base = OTHER; note = 2'-O-methyluridine-3'-phosphate
  modified_base 18: mod_base = OTHER; note = 2'-O-methylcytidine-3'-phosphate
  modified_base 19: mod_base = OTHER; note = 2'-deoxy-2'-fluorocytidine-3'-phosphate
  modified_base 20: mod_base = OTHER; note = 2'-O-methyladenosine-3'-phosphorothioate
  modified_base 21: mod_base = OTHER; note = 2'-deoxy-2'-fluorouridine
atgtaaccaagagtattccat

SEQ ID NO: 47 - RNA, 21 nt, synthetic construct
  source 1..21: mol_type = other RNA
  modified_base 1: mod_base = OTHER; note = 2'-deoxy-2'-fluorouridine-3'-phosphate
  modified_base 2: mod_base = OTHER; note = 2'-O-methylguanosine-3'-phosphate
  modified_base 3: mod_base = OTHER; note = 2'-deoxy-2'-fluoroguanosine-3'-phosphate
  modified_base 4: mod_base = OTHER; note = 2'-O-methylguanosine-3'-phosphate
  modified_base 5: mod_base = OTHER; note = 2'-deoxy-2'-fluoroadenosine-3'-phosphate
  modified_base 6: mod_base = OTHER; note = 2'-O-methyluridine-3'-phosphate
  modified_base 7: mod_base = OTHER; note = 2'-O-methyluridine-3'-phosphate
  modified_base 8: mod_base = OTHER; note = 2'-O-methyluridine-3'-phosphate
  modified_base 9: mod_base = OTHER; note = 2'-deoxy-2'-fluorocytidine-3'-phosphate
  modified_base 10: mod_base = OTHER; note = 2'-deoxy-2'-fluoroadenosine-3'-phosphate
  modified_base 11: mod_base = OTHER; note = 2'-deoxy-2'-fluorouridine-3'-phosphate
  modified_base 12: mod_base = OTHER; note = 2'-O-methylguanosine-3'-phosphate
  modified_base 13: mod_base = OTHER; note = 2'-deoxy-2'-fluorouridine-3'-phosphate
  modified_base 14: mod_base = OTHER; note = 2'-deoxy-2'-fluoroadenosine-3'-phosphate
  modified_base 15: mod_base = OTHER; note = 2'-deoxy-2'-fluoroadenosine-3'-phosphate
  modified_base 16: mod_base = OTHER; note = 2'-O-methylcytidine-3'-phosphate
  modified_base 17: mod_base = OTHER; note = 2'-deoxy-2'-fluorocytidine-3'-phosphate
  modified_base 18: mod_base = OTHER; note = 2'-O-methyladenosine-3'-phosphate
  modified_base 19: mod_base = OTHER; note = 2'-deoxy-2'-fluoroadenosine-3'-phosphate
  modified_base 20: mod_base = OTHER; note = 2'-O-methylguanosine-3'-phosphorothioate
  modified_base 21: mod_base = OTHER; note = 2'-deoxy-2'-fluoroadenosine
tgggatttcatgtaaccaaga

SEQ ID NO: 48 - RNA, 21 nt, synthetic construct
  source 1..21: mol_type = other RNA
  modified_base 1: mod_base = OTHER; note = 2'-deoxy-2'-fluoroadenosine-3'-phosphate
  modified_base 2: mod_base = OTHER; note = 2'-O-methyluridine-3'-phosphate
  modified_base 3: mod_base = OTHER; note = 2'-deoxy-2'-fluoroguanosine-3'-phosphate
  modified_base 4: mod_base = OTHER; note = 2'-O-methyluridine-3'-phosphate
  modified_base 5: mod_base = OTHER; note = 2'-deoxy-2'-fluoroadenosine-3'-phosphate
  modified_base 6: mod_base = OTHER; note = 2'-O-methyladenosine-3'-phosphate
  modified_base 7: mod_base = OTHER; note = 2'-deoxy-2'-fluorocytidine-3'-phosphate
  modified_base 8: mod_base = OTHER; note = 2'-O-methylcytidine-3'-phosphate
  modified_base 9: mod_base = OTHER; note = 2'-deoxy-2'-fluoroadenosine-3'-phosphate
  modified_base 10: mod_base = OTHER; note = 2'-deoxy-2'-fluoroadenosine-3'-phosphate
  modified_base 11: mod_base = OTHER; note = 2'-deoxy-2'-fluoroguanosine-3'-phosphate
  modified_base 12: mod_base = OTHER; note = 2'-O-methyladenosine-3'-phosphate
  modified_base 13: mod_base = OTHER; note = 2'-deoxy-2'-fluoroguanosine-3'-phosphate
  modified_base 14: mod_base = OTHER; note = 2'-O-methyluridine-3'-phosphate
  modified_base 15: mod_base = OTHER; note = 2'-O-methyladenosine-3'-phosphate
  modified_base 16: mod_base = OTHER; note = 2'-O-methyluridine-3'-phosphate
  modified_base 17: mod_base = OTHER; note = 2'-deoxy-2'-fluorouridine-3'-phosphate
  modified_base 18: mod_base = OTHER; note = 2'-O-methylcytidine-3'-phosphate
  modified_base 19: mod_base = OTHER; note = 2'-deoxy-2'-fluorocytidine-3'-phosphate
  modified_base 20: mod_base = OTHER; note = 2'-O-methyladenosine-3'-phosphorothioate
  modified_base 21: mod_base = OTHER; note = 2'-deoxy-2'-fluorouridine
atgtaaccaagagtattccat

SEQ ID NO: 49 - RNA, 21 nt, synthetic construct
  source 1..21: mol_type = other RNA
  modified_base 1: mod_base = OTHER; note = 2'-deoxy-2'-fluoroadenosine-3'-phosphorothioate
  modified_base 2: mod_base = OTHER; note = 2'-O-methyluridine-3'-phosphate
  modified_base 3: mod_base = OTHER; note = 2'-deoxy-2'-fluoroguanosine-3'-phosphate
  modified_base 4: mod_base = OTHER; note = 2'-O-methyluridine-3'-phosphate
  modified_base 5: mod_base = OTHER; note = 2'-deoxy-2'-fluoroadenosine-3'-phosphate
  modified_base 6: mod_base = OTHER; note = 2'-O-methyladenosine-3'-phosphate
  modified_base 7: mod_base = OTHER; note = 2'-deoxy-2'-fluorocytidine-3'-phosphate
  modified_base 8: mod_base = OTHER; note = 2'-O-methylcytidine-3'-phosphate
  modified_base 9: mod_base = OTHER; note = 2'-deoxy-2'-fluoroadenosine-3'-phosphate
  modified_base 10: mod_base = OTHER; note = 2'-deoxy-2'-fluoroadenosine-3'-phosphate
  modified_base 11: mod_base = OTHER; note = 2'-deoxy-2'-fluoroguanosine-3'-phosphate
  modified_base 12: mod_base = OTHER; note = 2'-O-methyladenosine-3'-phosphate
  modified_base 13: mod_base = OTHER; note = 2'-deoxy-2'-fluoroguanosine-3'-phosphate
  modified_base 14: mod_base = OTHER; note = 2'-O-methyluridine-3'-phosphate
  modified_base 15: mod_base = OTHER; note = 2'-deoxy-2'-fluoroadenosine-3'-phosphate
  modified_base 16: mod_base = OTHER; note = 2'-O-methyluridine-3'-phosphate
  modified_base 17: mod_base = OTHER; note = 2'-O-methyluridine-3'-phosphate
  modified_base 18: mod_base = OTHER; note = 2'-O-methylcytidine-3'-phosphate
  modified_base 19: mod_base = OTHER; note = 2'-deoxy-2'-fluorocytidine-3'-phosphate
  modified_base 20: mod_base = OTHER; note = 2'-O-methyladenosine-3'-phosphorothioate
  modified_base 21: mod_base = OTHER; note = 2'-deoxy-2'-fluorouridine
atgtaaccaagagtattccat

SEQ ID NO: 50 - RNA, 21 nt, synthetic construct
  source 1..21: mol_type = other RNA
  modified_base 1: mod_base = OTHER; note = 2'-O-methyladenosine-3'-phosphate
  modified_base 2: mod_base = OTHER; note = 2'-deoxy-2'-fluorouridine-3'-phosphate
  modified_base 3: mod_base = OTHER; note = 2'-O-methylguanosine-3'-phosphate
  modified_base 4: mod_base = OTHER; note = 2'-O-methyluridine-3'-phosphate
  modified_base 5: mod_base = OTHER; note = 2'-deoxy-2'-fluoroadenosine-3'-phosphate
  modified_base 6: mod_base = OTHER; note = 2'-deoxy-2'-fluoroadenosine-3'-phosphate
  modified_base 7: mod_base = OTHER; note = 2'-O-methylcytidine-3'-phosphate
  modified_base 8: mod_base = OTHER; note = 2'-O-methylcytidine-3'-phosphate
  modified_base 9: mod_base = OTHER; note = 2'-deoxy-2'-fluoroadenosine-3'-phosphate
  modified_base 10: mod_base = OTHER; note = 2'-deoxy-2'-fluoroadenosine-3'-phosphate
  modified_base 11: mod_base = OTHER; note = 2'-O-methylguanosine-3'-phosphate
  modified_base 12: mod_base = OTHER; note = 2'-O-methyladenosine-3'-phosphate
  modified_base 13: mod_base = OTHER; note = 2'-deoxy-2'-fluoroguanosine-3'-phosphate
  modified_base 14: mod_base = OTHER; note = 2'-deoxy-2'-fluoroguanosine-3'-phosphate
  modified_base 15: mod_base = OTHER; note = 2'-O-methyladenosine-3'-phosphate
  modified_base 16: mod_base = OTHER; note = 2'-O-methyluridine-3'-phosphate
  modified_base 17: mod_base = OTHER; note = 2'-deoxy-2'-fluorouridine-3'-phosphate
  modified_base 18: mod_base = OTHER; note = 2'-deoxy-2'-fluorocytidine-3'-phosphate
  modified_base 19: mod_base = OTHER; note = 2'-O-methylcytidine-3'-phosphate
  modified_base 20: mod_base = OTHER; note = 2'-O-methyladenosine-3'-phosphorothioate
  modified_base 21: mod_base = OTHER; note = 2'-deoxy-2'-fluorouridine
atgtaaccaagaggattccat

SEQ ID NO: 51 - RNA, 21 nt, synthetic construct
  source 1..21: mol_type = other RNA
  modified_base 1: mod_base = OTHER; note = 2'-deoxy-2'-fluoroadenosine-3'-phosphate
  modified_base 2: mod_base = OTHER; note = 2'-O-methyluridine-3'-phosphate
  modified_base 3: mod_base = OTHER; note = 2'-deoxy-2'-fluoroguanosine-3'-phosphate
  modified_base 4: mod_base = OTHER; note = 2'-O-methyluridine-3'-phosphate
  modified_base 5: mod_base = OTHER; note = 2'-deoxy-2'-fluoroadenosine-3'-phosphate
  modified_base 6: mod_base = OTHER; note = 2'-O-methyladenosine-3'-phosphate
  modified_base 7: mod_base = OTHER; note = 2'-deoxy-2'-fluorocytidine-3'-phosphate
  modified_base 8: mod_base = OTHER; note = 2'-O-methylcytidine-3'-phosphate
  modified_base 9: mod_base = OTHER; note = 2'-deoxy-2'-fluoroadenosine-3'-phosphate
  modified_base 10: mod_base = OTHER; note = 2'-deoxy-2'-fluoroadenosine-3'-phosphate
  modified_base 11: mod_base = OTHER; note = 2'-deoxy-2'-fluoroguanosine-3'-phosphate
  modified_base 12: mod_base = OTHER; note = 2'-O-methyladenosine-3'-phosphate
  modified_base 13: mod_base = OTHER; note = 2'-O-methylguanosine-3'-phosphate
  modified_base 14: mod_base = OTHER; note = 2'-O-methyluridine-3'-phosphate
  modified_base 15: mod_base = OTHER; note = 2'-deoxy-2'-fluoroadenosine-3'-phosphate
  modified_base 16: mod_base = OTHER; note = 2'-O-methyluridine-3'-phosphate
  modified_base 17: mod_base = OTHER; note = 2'-deoxy-2'-fluorouridine-3'-phosphate
  modified_base 18: mod_base = OTHER; note = 2'-O-methylcytidine-3'-phosphate
  modified_base 19: mod_base = OTHER; note = 2'-deoxy-2'-fluorocytidine-3'-phosphate
  modified_base 20: mod_base = OTHER; note = 2'-O-methyladenosine-3'-phosphorothioate
  modified_base 21: mod_base = OTHER; note = 2'-deoxy-2'-fluorouridine
atgtaaccaagagtattccat

SEQ ID NO: 52 - RNA, 21 nt, synthetic construct
  source 1..21: mol_type = other RNA
  modified_base 1: mod_base = OTHER; note = 2'-deoxy-2'-fluorouridine-3'-phosphate
  modified_base 2: mod_base = OTHER; note = 2'-O-methylguanosine-3'-phosphate
  modified_base 3: mod_base = OTHER; note = 2'-deoxy-2'-fluoroguanosine-3'-phosphate
  modified_base 4: mod_base = OTHER; note = 2'-deoxy-2'-fluoroguanosine-3'-phosphate
  modified_base 5: mod_base = OTHER; note = 2'-deoxy-2'-fluoroadenosine-3'-phosphate
  modified_base 6: mod_base = OTHER; note = 2'-O-methyluridine-3'-phosphate
  modified_base 7: mod_base = OTHER; note = 2'-deoxy-2'-fluorouridine-3'-phosphate
  modified_base 8: mod_base = OTHER; note = 2'-O-methyluridine-3'-phosphate
  modified_base 9: mod_base = OTHER; note = 2'-deoxy-2'-fluorocytidine-3'-phosphate
  modified_base 10: mod_base = OTHER; note = 2'-O-methyladenosine-3'-phosphate
  modified_base 11: mod_base = OTHER; note = 2'-deoxy-2'-fluorouridine-3'-phosphate
  modified_base 12: mod_base = OTHER; note = 2'-O-methylguanosine-3'-phosphate
  modified_base 13: mod_base = OTHER; note = 2'-deoxy-2'-fluorouridine-3'-phosphate
  modified_base 14: mod_base = OTHER; note = 2'-deoxy-2'-fluoroadenosine-3'-phosphate
  modified_base 15: mod_base = OTHER; note = 2'-deoxy-2'-fluoroadenosine-3'-phosphate
  modified_base 16: mod_base = OTHER; note = 2'-O-methylcytidine-3'-phosphate
  modified_base 17: mod_base = OTHER; note = 2'-deoxy-2'-fluorocytidine-3'-phosphate
  modified_base 18: mod_base = OTHER; note = 2'-O-methyladenosine-3'-phosphate
  modified_base 19: mod_base = OTHER; note = 2'-deoxy-2'-fluoroadenosine-3'-phosphate
  modified_base 20: mod_base = OTHER; note = 2'-O-methylguanosine-3'-phosphorothioate
  modified_base 21: mod_base = OTHER; note = 2'-deoxy-2'-fluoroadenosine
tgggatttcatgtaaccaaga

SEQ ID NO: 53 - RNA, 21 nt, synthetic construct
  source 1..21: mol_type = other RNA
  modified_base 1: mod_base = OTHER; note = 2'-deoxy-2'-fluoroadenosine-3'-phosphate
  modified_base 2: mod_base = OTHER; note = 2'-O-methyluridine-3'-phosphate
  modified_base 3: mod_base = OTHER; note = 2'-deoxy-2'-fluoroguanosine-3'-phosphate
  modified_base 4: mod_base = OTHER; note = 2'-O-methyluridine-3'-phosphate
  modified_base 5: mod_base = OTHER; note = 2'-deoxy-2'-fluoroadenosine-3'-phosphate
  modified_base 6: mod_base = OTHER; note = 2'-O-methyladenosine-3'-phosphate
  modified_base 7: mod_base = OTHER; note = 2'-deoxy-2'-fluorocytidine-3'-phosphate
  modified_base 8: mod_base = OTHER; note = 2'-O-methylcytidine-3'-phosphate
  modified_base 9: mod_base = OTHER; note = 2'-deoxy-2'-fluoroadenosine-3'-phosphate
  modified_base 10: mod_base = OTHER; note = 2'-deoxy-2'-fluoroadenosine-3'-phosphate
  modified_base 11: mod_base = OTHER; note = 2'-deoxy-2'-fluoroguanosine-3'-phosphate
  modified_base 12: mod_base = OTHER; note = 2'-O-methyladenosine-3'-phosphate
  modified_base 13: mod_base = OTHER; note = 2'-deoxy-2'-fluoroguanosine-3'-phosphate
  modified_base 14: mod_base = OTHER; note = 2'-O-methyluridine-3'-phosphate
  modified_base 15: mod_base = OTHER; note = 2'-deoxy-2'-fluoroadenosine-3'-phosphate
  modified_base 16: mod_base = OTHER; note = 2'-O-methyluridine-3'-phosphate
  modified_base 17: mod_base = OTHER; note = 2'-deoxy-2'-fluorouridine-3'-phosphate
  modified_base 18: mod_base = OTHER; note = 2'-O-methylcytidine-3'-phosphate
  modified_base 19: mod_base = OTHER; note = 2'-deoxy-2'-fluorocytidine-3'-phosphate
  modified_base 20: mod_base = OTHER; note = 2'-O-methyladenosine-3'-phosphorothioate
  modified_base 21: mod_base = OTHER; note = 2'-deoxy-2'-fluorouridine
atgtaaccaagagtattccat

SEQ ID NO: 54 - RNA, 21 nt, synthetic construct
  source 1..21: mol_type = other RNA
  modified_base 1: mod_base = OTHER; note = 2'-deoxy-2'-fluoroadenosine-3'-phosphate
  modified_base 2: mod_base = OTHER; note = 2'-O-methyluridine-3'-phosphate
  modified_base 3: mod_base = OTHER; note = 2'-deoxy-2'-fluoroguanosine-3'-phosphate
  modified_base 4: mod_base = OTHER; note = 2'-O-methyluridine-3'-phosphate
  modified_base 5: mod_base = OTHER; note = 2'-deoxy-2'-fluoroadenosine-3'-phosphate
  modified_base 6: mod_base = OTHER; note = 2'-deoxy-2'-fluoroadenosine-3'-phosphate
  modified_base 7: mod_base = OTHER; note = 2'-O-methylcytidine-3'-phosphate
  modified_base 8: mod_base = OTHER; note = 2'-O-methylcytidine-3'-phosphate
  modified_base 9: mod_base = OTHER; note = 2'-deoxy-2'-fluoroadenosine-3'-phosphate
  modified_base 10: mod_base = OTHER; note = 2'-deoxy-2'-fluoroadenosine-3'-phosphate
  modified_base 11: mod_base = OTHER; note = 2'-deoxy-2'-fluoroguanosine-3'-phosphate
  modified_base 12: mod_base = OTHER; note = 2'-deoxy-2'-fluoroadenosine-3'-phosphate
  modified_base 13: mod_base = OTHER; note = 2'-deoxy-2'-fluoroguanosine-3'-phosphate
  modified_base 14: mod_base = OTHER; note = 2'-O-methyluridine-3'-phosphate
  modified_base 15: mod_base = OTHER; note = 2'-deoxy-2'-fluoroadenosine-3'-phosphate
  modified_base 16: mod_base = OTHER; note = 2'-O-methyluridine-3'-phosphate
  modified_base 17: mod_base = OTHER; note = 2'-O-methyluridine-3'-phosphate
  modified_base 18: mod_base = OTHER; note = 2'-O-methylcytidine-3'-phosphate
  modified_base 19: mod_base = OTHER; note = 2'-O-methylcytidine-3'-phosphate
  modified_base 20: mod_base = OTHER; note = 2'-deoxy-2'-fluoroadenosine-3'-phosphorothioate
  modified_base 21: mod_base = OTHER; note = 2'-O-methyluridine
atgtaaccaagagtattccat

SEQ ID NO: 55 - RNA, 21 nt, synthetic construct
  source 1..21: mol_type = other RNA
  modified_base 1: mod_base = OTHER; note = 2'-deoxy-2'-fluorouridine-3'-phosphate
  modified_base 2: mod_base = OTHER; note = 2'-O-methylguanosine-3'-phosphate
  modified_base 3: mod_base = OTHER; note = 2'-deoxy-2'-fluoroguanosine-3'-phosphate
  modified_base 4: mod_base = OTHER; note = 2'-O-methylguanosine-3'-phosphate
  modified_base 5: mod_base = OTHER; note = 2'-deoxy-2'-fluoroadenosine-3'-phosphate
  modified_base 6: mod_base = OTHER; note = 2'-O-methyluridine-3'-phosphate
  modified_base 7: mod_base = OTHER; note = 2'-O-methyluridine-3'-phosphate
  modified_base 8: mod_base = OTHER; note = 2'-O-methyluridine-3'-phosphate
  modified_base 9: mod_base = OTHER; note = 2'-deoxy-2'-fluorocytidine-3'-phosphate
  modified_base 10: mod_base = OTHER; note = 2'-O-methyladenosine-3'-phosphate
  modified_base 11: mod_base = OTHER; note = 2'-deoxy-2'-fluorouridine-3'-phosphate
  modified_base 12: mod_base = OTHER; note = 2'-O-methylguanosine-3'-phosphate
  modified_base 13: mod_base = OTHER; note = 2'-deoxy-2'-fluorouridine-3'-phosphate
  modified_base 14: mod_base = OTHER; note = 2'-O-methyladenosine-3'-phosphate
  modified_base 15: mod_base = OTHER; note = 2'-deoxy-2'-fluoroadenosine-3'-phosphate
  modified_base 16: mod_base = OTHER; note = 2'-O-methylcytidine-3'-phosphate
  modified_base 17: mod_base = OTHER; note = 2'-deoxy-2'-fluorocytidine-3'-phosphate
  modified_base 18: mod_base = OTHER; note = 2'-deoxy-2'-fluoroadenosine-3'-phosphate
  modified_base 19: mod_base = OTHER; note = 2'-deoxy-2'-fluoroadenosine-3'-phosphate
  modified_base 20: mod_base = OTHER; note = 2'-O-methylguanosine-3'-phosphorothioate
  modified_base 21: mod_base = OTHER; note = 2'-deoxy-2'-fluoroadenosine
tgggatttcatgtaaccaaga

SEQ ID NO: 56 - RNA, 21 nt, synthetic construct
  source 1..21: mol_type = other RNA
  modified_base 1: mod_base = OTHER; note = 2'-deoxy-2'-fluoroadenosine-3'-phosphate
  modified_base 2: mod_base = OTHER; note = 2'-O-methyluridine-3'-phosphate
  modified_base 3: mod_base = OTHER; note = 2'-deoxy-2'-fluoroguanosine-3'-phosphate
  modified_base 4: mod_base = OTHER; note = 2'-O-methyluridine-3'-phosphate
  modified_base 5: mod_base = OTHER; note = 2'-deoxy-2'-fluoroadenosine-3'-phosphate
  modified_base 6: mod_base = OTHER; note = 2'-O-methyladenosine-3'-phosphate
  modified_base 7: mod_base = OTHER; note = 2'-O-methylcytidine-3'-phosphate
  modified_base 8: mod_base = OTHER; note = 2'-O-methylcytidine-3'-phosphate
  modified_base 9: mod_base = OTHER; note = 2'-O-methyladenosine-3'-phosphate
  modified_base 10: mod_base = OTHER; note = 2'-O-methyladenosine-3'-phosphate
  modified_base 11: mod_base = OTHER; note = 2'-O-methylguanosine-3'-phosphate
  modified_base 12: mod_base = OTHER; note = 2'-O-methyladenosine-3'-phosphate
  modified_base 13: mod_base = OTHER; note = 2'-O-methylguanosine-3'-phosphate
  modified_base 14: mod_base = OTHER; note = 2'-O-methyluridine-3'-phosphate
  modified_base 15: mod_base = OTHER; note = 2'-deoxy-2'-fluoroadenosine-3'-phosphate
  modified_base 16: mod_base = OTHER; note = 2'-O-methyluridine-3'-phosphate
  modified_base 17: mod_base = OTHER; note = 2'-deoxy-2'-fluorouridine-3'-phosphate
  modified_base 18: mod_base = OTHER; note = 2'-O-methylcytidine-3'-phosphate
  modified_base 19: mod_base = OTHER; note = 2'-deoxy-2'-fluorocytidine-3'-phosphate
  modified_base 20: mod_base = OTHER; note = 2'-O-methyladenosine-3'-phosphorothioate
  modified_base 21: mod_base = OTHER; note = 2'-deoxy-2'-fluorouridine
atgtaaccaagagtattccat

SEQ ID NO: 57 - DNA, 21 bp, synthetic construct
  source 1..21: mol_type = other DNA
  modified_base 1: mod_base = OTHER; note = 2'-deoxy-2'-fluoroadenosine-3'-phosphate
  modified_base 2: mod_base = OTHER; note = 2'-O-methyluridine-3'-phosphate
  modified_base 3: mod_base = OTHER; note = 2'-O-methylguanosine-3'-phosphate
  modified_base 4: mod_base = OTHER; note = 2'-O-methyluridine-3'-phosphate
  modified_base 5: mod_base = OTHER; note = 2'-deoxy-2'-fluoroadenosine-3'-phosphate
  modified_base 6: mod_base = OTHER; note = 2'-O-methyladenosine-3'-phosphate
  modified_base 7: mod_base = OTHER; note = 2'-O-methylcytidine-3'-phosphate
  modified_base 8: mod_base = OTHER; note = 2'-O-methylcytidine-3'-phosphate
  modified_base 9: mod_base = OTHER; note = 2'-deoxy-2'-fluoroadenosine-3'-phosphate
  modified_base 10: mod_base = OTHER; note = 2'-O-methyladenosine-3'-phosphate
  modified_base 11: mod_base = OTHER; note = 2'-deoxy-2'-fluoroguanosine-3'-phosphate
  modified_base 13: mod_base = OTHER; note = 2'-deoxy-2'-fluoroguanosine-3'-phosphate
  modified_base 15: mod_base = OTHER; note = adenosine-3'-phosphate
  modified_base 17: mod_base = OTHER; note = uridine-3'-phosphate
  modified_base 19: mod_base = OTHER; note = 2'-O-methylcytidine-3'-phosphate
  modified_base 20: mod_base = OTHER; note = 2'-deoxyadenosine-3'-phosphorothioate
  modified_base 21: mod_base = OTHER; note = 2'-O-methyluridine
  misc_feature 1..11: note = RNA
  misc_feature 13: note = RNA
  misc_feature 15: note = RNA
  misc_feature 17: note = RNA
  misc_feature 19: note = RNA
  misc_feature 21: note = RNA
  misc_feature 12: note = DNA
  misc_feature 14: note = DNA
  misc_feature 16: note = DNA
  misc_feature 18: note = DNA
  misc_feature 20: note = DNA
atgtaaccaagagtattccat

SEQ ID NO: 58 - DNA, 21 bp, synthetic construct
  source 1..21: mol_type = other DNA
  modified_base 1: mod_base = OTHER; note = 2'-deoxy-2'-fluoroadenosine-3'-phosphate
  modified_base 2: mod_base = OTHER; note = 2'-O-methyluridine-3'-phosphate
  modified_base 3: mod_base = OTHER; note = 2'-O-methylguanosine-3'-phosphate
  modified_base 4: mod_base = OTHER; note = 2'-O-methyluridine-3'-phosphate
  modified_base 5: mod_base = OTHER; note = 2'-deoxy-2'-fluoroadenosine-3'-phosphate
  modified_base 6: mod_base = OTHER; note = 2'-O-methyladenosine-3'-phosphate
  modified_base 7: mod_base = OTHER; note = 2'-O-methylcytidine-3'-phosphate
  modified_base 8: mod_base = OTHER; note = 2'-O-methylcytidine-3'-phosphate
  modified_base 9: mod_base = OTHER; note = 2'-deoxy-2'-fluoroadenosine-3'-phosphate
  modified_base 10: mod_base = OTHER; note = 2'-O-methyladenosine-3'-phosphate
  modified_base 11: mod_base = OTHER; note = 2'-deoxy-2'-fluoroguanosine-3'-phosphate
  modified_base 13: mod_base = OTHER; note = 2'-deoxy-2'-fluoroguanosine-3'-phosphate
  modified_base 15: mod_base = OTHER; note = adenosine-3'-phosphate
  modified_base 17: mod_base = OTHER; note = uridine-3'-phosphate
  modified_base 19: mod_base = OTHER; note = 2'-O-methylcytidine-3'-phosphate
  modified_base 20: mod_base = OTHER; note = 2'-deoxyadenosine-3'-phosphorothioate
  modified_base 21: mod_base = OTHER; note = 2'-O-methyluridine
  misc_feature 1..11: note = RNA
  misc_feature 13: note = RNA
  misc_feature 15: note = RNA
  misc_feature 17: note = RNA
  misc_feature 19: note = RNA
  misc_feature 21: note = RNA
  misc_feature 12: note = DNA
  misc_feature 14: note = DNA
  misc_feature 16: note = DNA
  misc_feature 18: note = DNA
  misc_feature 20: note = DNA
atgtaaccaagagtattccat

SEQ ID NO: 59 - DNA, 21 bp, synthetic construct
  source 1..21: mol_type = other DNA
  modified_base 1: mod_base = OTHER; note = 2'-deoxy-2'-fluoroadenosine-3'-phosphate
  modified_base 2: mod_base = OTHER; note = 2'-O-methyluridine-3'-phosphate
  modified_base 3: mod_base = OTHER; note = 2'-deoxy-2'-fluoroguanosine-3'-phosphate
  modified_base 4: mod_base = OTHER; note = 2'-O-methyluridine-3'-phosphate
  modified_base 5: mod_base = OTHER; note = 2'-deoxy-2'-fluoroadenosine-3'-phosphate
  modified_base 6: mod_base = OTHER; note = 2'-O-methyladenosine-3'-phosphate
  modified_base 7: mod_base = OTHER; note = 2'-deoxy-2'-fluorocytidine-3'-phosphate
  modified_base 8: mod_base = OTHER; note = 2'-O-methylcytidine-3'-phosphate
  modified_base 9: mod_base = OTHER; note = 2'-deoxy-2'-fluoroadenosine-3'-phosphate
  modified_base 10: mod_base = OTHER; note = 2'-O-methyladenosine-3'-phosphate
  modified_base 11: mod_base = OTHER; note = 2'-deoxy-2'-fluoroguanosine-3'-phosphate
  modified_base 12: mod_base = OTHER; note = 2'-O-methyladenosine-3'-phosphate
  modified_base 15: mod_base = OTHER; note = 2'-deoxy-2'-fluoroadenosine-3'-phosphate
  modified_base 16: mod_base = OTHER; note = 2'-O-methyluridine-3'-phosphate
  modified_base 17: mod_base = OTHER; note = 2'-deoxy-2'-fluorouridine-3'-phosphate
  modified_base 18: mod_base = OTHER; note = 2'-O-methylcytidine-3'-phosphate
  modified_base 20: mod_base = OTHER; note = 2'-deoxyadenosine-3'-phosphorothioate
  modified_base 21: mod_base = OTHER; note = 2'-deoxy-2'-fluorouridine
  misc_feature 1..12: note = RNA
  misc_feature 15..18: note = RNA
  misc_feature 21: note = RNA
  misc_feature 13..14: note = DNA
  misc_feature 19..20: note = DNA
atgtaaccaagagtattccat

SEQ ID NO: 60 - DNA, 21 bp, synthetic construct
  source 1..21: mol_type = other DNA
  modified_base 1: mod_base = OTHER; note = 2'-deoxy-2'-fluoroadenosine-3'-phosphate
  modified_base 2: mod_base = OTHER; note = 2'-O-methyluridine-3'-phosphate
  modified_base 3: mod_base = OTHER; note = 2'-O-methylguanosine-3'-phosphate
  modified_base 4: mod_base = OTHER; note = 2'-O-methyluridine-3'-phosphate
  modified_base 5: mod_base = OTHER; note = 2'-deoxy-2'-fluoroadenosine-3'-phosphate
  modified_base 6: mod_base = OTHER; note = 2'-O-methyladenosine-3'-phosphate
  modified_base 7: mod_base = OTHER; note = 2'-O-methylcytidine-3'-phosphate
  modified_base 8: mod_base = OTHER; note = 2'-O-methylcytidine-3'-phosphate
  modified_base 9: mod_base = OTHER; note = 2'-deoxy-2'-fluoroadenosine-3'-phosphate
  modified_base 10: mod_base = OTHER; note = 2'-O-methyladenosine-3'-phosphate
  modified_base 11: mod_base = OTHER; note = 2'-deoxy-2'-fluoroguanosine-3'-phosphate
  modified_base 12: mod_base = OTHER; note = 2'-O-methyladenosine-3'-phosphate
  modified_base 13: mod_base = OTHER; note = 2'-deoxy-2'-fluoroguanosine-3'-phosphate
  modified_base 15: mod_base = OTHER; note = adenosine-3'-phosphate
  modified_base 17: mod_base = OTHER; note = uridine-3'-phosphate
  modified_base 19: mod_base = OTHER; note = 2'-O-methylcytidine-3'-phosphate
  modified_base 20: mod_base = OTHER; note = 2'-deoxyadenosine-3'-phosphorothioate
  modified_base 21: mod_base = OTHER; note = 2'-O-methyluridine
  misc_feature 1..13: note = RNA
  misc_feature 15: note = RNA
  misc_feature 17: note = RNA
  misc_feature 19: note = RNA
  misc_feature 21: note = RNA
  misc_feature 14: note = DNA
  misc_feature 16: note = DNA
  misc_feature 18: note = DNA
  misc_feature 20: note = DNA
atgtaaccaagagtattccat

SEQ ID NO: 61 - RNA, 21 nt, synthetic construct
  source 1..21: mol_type = other RNA
  modified_base 2: mod_base = OTHER; note = 2'-O-methyluridine-3'-phosphate
  modified_base 4: mod_base = OTHER; note = 2'-O-methyluridine-3'-phosphate
  modified_base 6: mod_base = OTHER; note = 2'-O-methyladenosine-3'-phosphate
  modified_base 8: mod_base = OTHER; note = 2'-O-methylcytidine-3'-phosphate
  modified_base 10: mod_base = OTHER; note = 2'-O-methyladenosine-3'-phosphate
  modified_base 12: mod_base = OTHER; note = 2'-O-methyladenosine-3'-phosphate
  modified_base 14: mod_base = OTHER; note = 2'-O-methyluridine-3'-phosphate
  modified_base 16: mod_base = OTHER; note = 2'-O-methyluridine-3'-phosphate
  modified_base 18: mod_base = OTHER; note = 2'-O-methylcytidine-3'-phosphate
  modified_base 20: mod_base = OTHER; note = 2'-O-methyladenosine-3'-phosphorothioate
atgtaaccaagagtattccat

SEQ ID NO: 62 - RNA, 21 nt, synthetic construct
  source 1..21: mol_type = other RNA
  modified_base 1: mod_base = OTHER; note = 2'-deoxy-2'-fluoroadenosine-3'-phosphate
  modified_base 2: mod_base = OTHER; note = 2'-O-methyluridine-3'-phosphate
  modified_base 3: mod_base = OTHER; note = 2'-O-methylguanosine-3'-phosphate
  modified_base 4: mod_base = OTHER; note = 2'-O-methyluridine-3'-phosphate
  modified_base 5: mod_base = OTHER; note = 2'-deoxy-2'-fluoroadenosine-3'-phosphate
  modified_base 6: mod_base = OTHER; note = 2'-O-methyladenosine-3'-phosphate
  modified_base 7: mod_base = OTHER; note = 2'-O-methylcytidine-3'-phosphate
  modified_base 8: mod_base = OTHER; note = 2'-O-methylcytidine-3'-phosphate
  modified_base 9: mod_base = OTHER; note = 2'-deoxy-2'-fluoroadenosine-3'-phosphate
  modified_base 10: mod_base = OTHER; note = 2'-O-methyladenosine-3'-phosphate
  modified_base 11: mod_base = OTHER; note = 2'-O-methylguanosine-3'-phosphate
  modified_base 12: mod_base = OTHER; note = 2'-O-methyladenosine-3'-phosphate
  modified_base 13: mod_base = OTHER; note = 2'-deoxy-2'-fluoroguanosine-3'-phosphate
  modified_base 14: mod_base = OTHER; note = 2'-O-methyluridine-3'-phosphate
  modified_base 15: mod_base = OTHER; note = 2'-O-methyladenosine-3'-phosphate
  modified_base 16: mod_base = OTHER; note = 2'-O-methyluridine-3'-phosphate
  modified_base 17: mod_base = OTHER; note = 2'-deoxy-2'-fluorouridine-3'-phosphate
  modified_base 18: mod_base = OTHER; note = 2'-O-methylcytidine-3'-phosphate
  modified_base 19: mod_base = OTHER; note = 2'-O-methylcytidine-3'-phosphate
  modified_base 20: mod_base = OTHER; note = 2'-O-methyladenosine-3'-phosphorothioate
  modified_base 21: mod_base = OTHER; note = 2'-deoxy-2'-fluorouridine
atgtaaccaagagtattccat

SEQ ID NO: 63 - RNA, 21 nt, synthetic construct
  source 1..21: mol_type = other RNA
  modified_base 1: mod_base = OTHER; note = 2'-deoxy-2'-fluoroadenosine-3'-phosphate
  modified_base 2: mod_base = OTHER; note = 2'-O-methyluridine-3'-phosphate
  modified_base 3: mod_base = OTHER; note = 2'-deoxy-2'-fluoroguanosine-3'-phosphate
  modified_base 4: mod_base = OTHER; note = 2'-O-methyluridine-3'-phosphate
  modified_base 5: mod_base = OTHER; note = 2'-deoxy-2'-fluoroadenosine-3'-phosphate
  modified_base 6: mod_base = OTHER; note = 2'-O-methyladenosine-3'-phosphate
  modified_base 7: mod_base = OTHER; note = 2'-O-methylcytidine-3'-phosphate
  modified_base 8: mod_base = OTHER; note = 2'-O-methylcytidine-3'-phosphate
  modified_base 9: mod_base = OTHER; note = 2'-O-methyladenosine-3'-phosphate
  modified_base 10: mod_base = OTHER; note = 2'-O-methyladenosine-3'-phosphate
  modified_base 11: mod_base = OTHER; note = 2'-O-methylguanosine-3'-phosphate
  modified_base 12: mod_base = OTHER; note = 2'-O-methyladenosine-3'-phosphate
  modified_base 13: mod_base = OTHER; note = 2'-O-methylguanosine-3'-phosphate
  modified_base 14: mod_base = OTHER; note = 2'-O-methyluridine-3'-phosphate
  modified_base 15: mod_base = OTHER; note = 2'-deoxy-2'-fluoroadenosine-3'-phosphate
  modified_base 16: mod_base = OTHER; note = 2'-O-methyluridine-3'-phosphate
  modified_base 17: mod_base = OTHER; note = 2'-deoxy-2'-fluorouridine-3'-phosphate
  modified_base 18: mod_base = OTHER; note = 2'-O-methylcytidine-3'-phosphate
  modified_base 19: mod_base = OTHER; note = 2'-deoxy-2'-fluorocytidine-3'-phosphate
  modified_base 20: mod_base = OTHER; note = 2'-O-methyladenosine-3'-phosphorothioate
  modified_base 21: mod_base = OTHER; note = 2'-deoxy-2'-fluorouridine
atgtaaccaagagtattccat

SEQ ID NO: 64 - DNA, 21 bp, synthetic construct
  source 1..21: mol_type = other DNA
  modified_base 1: mod_base = OTHER; note = 2'-deoxy-2'-fluoroadenosine-3'-phosphate
  modified_base 2: mod_base = OTHER; note = 2'-O-methyluridine-3'-phosphate
  modified_base 3: mod_base = OTHER; note = 2'-O-methylguanosine-3'-phosphate
  modified_base 4: mod_base = OTHER; note = 2'-O-methyluridine-3'-phosphate
  modified_base 5: mod_base = OTHER; note = 2'-deoxy-2'-fluoroadenosine-3'-phosphate
  modified_base 6: mod_base = OTHER; note = 2'-O-methyladenosine-3'-phosphate
  modified_base 7: mod_base = OTHER; note = 2'-O-methylcytidine-3'-phosphate
  modified_base 8: mod_base = OTHER; note = 2'-O-methylcytidine-3'-phosphate
  modified_base 9: mod_base = OTHER; note = 2'-deoxy-2'-fluoroadenosine-3'-phosphate
  modified_base 10: mod_base = OTHER; note = 2'-O-methyladenosine-3'-phosphate
  modified_base 11: mod_base = OTHER; note = 2'-deoxy-2'-fluoroguanosine-3'-phosphate
  modified_base 13: mod_base = OTHER; note = 2'-deoxy-2'-fluoroguanosine-3'-phosphate
  modified_base 15: mod_base = OTHER; note = adenosine-3'-phosphate
  modified_base 17: mod_base = OTHER; note = uridine-3'-phosphate
  modified_base 19: mod_base = OTHER; note = 2'-O-methylcytidine-3'-phosphate
  modified_base 20: mod_base = OTHER; note = 2'-deoxyadenosine-3'-phosphorothioate
  modified_base 21: mod_base = OTHER; note = 2'-O-methyluridine
  misc_feature 1..11: note = RNA
  misc_feature 13: note = RNA
  misc_feature 15: note = RNA
  misc_feature 17: note = RNA
  misc_feature 19: note = RNA
  misc_feature 21: note = RNA
  misc_feature 12: note = DNA
  misc_feature 14: note = DNA
  misc_feature 16: note = DNA
  misc_feature 18: note = DNA
  misc_feature 20: note = DNA
atgtaaccaagagtattccat

SEQ ID NO: 65 - DNA, 21 bp, synthetic construct
  source 1..21: mol_type = other DNA
  modified_base 1: mod_base = OTHER; note = 2'-O-methyladenosine-3'-phosphate
  modified_base 3: mod_base = OTHER; note = 2'-O-methylguanosine-3'-phosphate
  modified_base 4: mod_base = OTHER; note = 2'-O-methyluridine-3'-phosphate
  modified_base 7: mod_base = OTHER; note = 2'-O-methylcytidine-3'-phosphate
  modified_base 8: mod_base = OTHER; note = 2'-O-methylcytidine-3'-phosphate
  modified_base 11: mod_base = OTHER; note = 2'-O-methylguanosine-3'-phosphate
  modified_base 12: mod_base = OTHER; note = 2'-O-methyladenosine-3'-phosphate
  modified_base 13: mod_base = OTHER; note = 2'-O-methylguanosine-3'-phosphate
  modified_base 15: mod_base = OTHER; note = 2'-O-methyladenosine-3'-phosphate
  modified_base 17: mod_base = OTHER; note = 2'-O-methyluridine-3'-phosphate
  modified_base 19: mod_base = OTHER; note = 2'-O-methylcytidine-3'-phosphate
  modified_base 20: mod_base = OTHER; note = 2'-O-methyladenosine-3'-phosphorothioate
  misc_feature 1: note = RNA
  misc_feature 3..4: note = RNA
  misc_feature 7..8: note = RNA
  misc_feature 11..13: note = RNA
  misc_feature 15: note = RNA
  misc_feature 17: note = RNA
  misc_feature 19..20: note = RNA
  misc_feature 2: note = DNA
  misc_feature 5..6: note = DNA
  misc_feature 9..10: note = DNA
  misc_feature 14: note = DNA
  misc_feature 16: note = DNA
  misc_feature 18: note = DNA
  misc_feature 21: note = DNA
atgtaaccaagagtattccat

SEQ ID NO: 66 - DNA, 21 bp, synthetic construct
  source 1..21: mol_type = other DNA
  modified_base 1: mod_base = OTHER; note = 2'-deoxy-2'-fluoroadenosine-3'-phosphate
  modified_base 2: mod_base = OTHER; note = 2'-O-methyluridine-3'-phosphate
  modified_base 3: mod_base = OTHER; note = 2'-deoxy-2'-fluoroguanosine-3'-phosphate
  modified_base 4: mod_base = OTHER; note = 2'-O-methyluridine-3'-phosphate
  modified_base 5: mod_base = OTHER; note = 2'-deoxy-2'-fluoroadenosine-3'-phosphate
  modified_base 6: mod_base = OTHER; note = 2'-O-methyladenosine-3'-phosphate
  modified_base 7: mod_base = OTHER; note = 2'-deoxy-2'-fluorocytidine-3'-phosphate
  modified_base 8: mod_base = OTHER; note = 2'-O-methylcytidine-3'-phosphate
  modified_base 9: mod_base = OTHER; note = 2'-deoxy-2'-fluoroadenosine-3'-phosphate
  modified_base 10: mod_base = OTHER; note = 2'-O-methyladenosine-3'-phosphate
  modified_base 11: mod_base = OTHER; note = 2'-deoxy-2'-fluoroguanosine-3'-phosphate
  modified_base 14: mod_base = OTHER; note = 2'-O-methyluridine-3'-phosphate
  modified_base 15: mod_base = OTHER; note = 2'-deoxy-2'-fluoroadenosine-3'-phosphate
  modified_base 16: mod_base = OTHER; note = 2'-O-methyluridine-3'-phosphate
  modified_base 17: mod_base = OTHER; note = 2'-deoxy-2'-fluorouridine-3'-phosphate
  modified_base 18: mod_base = OTHER; note = 2'-O-methylcytidine-3'-phosphate
  modified_base 20: mod_base = OTHER; note = 2'-deoxyadenosine-3'-phosphorothioate
  modified_base 21: mod_base = OTHER; note = 2'-deoxy-2'-fluorouridine
  misc_feature 1..11: note = RNA
  misc_feature 14..18: note = RNA
  misc_feature 21: note = RNA
  misc_feature 12..13: note = DNA
  misc_feature 19..20: note = DNA
atgtaaccaagagtattccat

SEQ ID NO: 67 - DNA, 21 bp, synthetic construct
  source 1..21: mol_type = other DNA
  modified_base 1: mod_base = OTHER; note = 2'-deoxy-2'-fluoroadenosine-3'-phosphate
  modified_base 2: mod_base = OTHER; note = 2'-O-methyluridine-3'-phosphate
  modified_base 3: mod_base = OTHER; note = 2'-O-methylguanosine-3'-phosphate
  modified_base 4: mod_base = OTHER; note = 2'-O-methyluridine-3'-phosphate
  modified_base 5: mod_base = OTHER; note = 2'-deoxy-2'-fluoroadenosine-3'-phosphate
  modified_base 6: mod_base = OTHER; note = 2'-O-methyladenosine-3'-phosphate
  modified_base 7: mod_base = OTHER; note = 2'-O-methylcytidine-3'-phosphate
  modified_base 8: mod_base = OTHER; note = 2'-O-methylcytidine-3'-phosphate
  modified_base 9: mod_base = OTHER; note = 2'-deoxy-2'-fluoroadenosine-3'-phosphate
  modified_base 10: mod_base = OTHER; note = 2'-O-methyladenosine-3'-phosphate
  modified_base 11: mod_base = OTHER; note = 2'-deoxy-2'-fluoroguanosine-3'-phosphate
  modified_base 13: mod_base = OTHER; note = 2'-deoxy-2'-fluoroguanosine-3'-phosphate
  modified_base 15: mod_base = OTHER; note = adenosine-3'-phosphate
  modified_base 17: mod_base = OTHER; note = 2'-O-methyluridine-3'-phosphate
  modified_base 19: mod_base = OTHER; note = 2'-O-methylcytidine-3'-phosphate
  modified_base 20: mod_base = OTHER; note = 2'-deoxyadenosine-3'-phosphorothioate
  modified_base 21: mod_base = OTHER; note = 2'-O-methyluridine
  misc_feature 1..11: note = RNA
  misc_feature 13: note = RNA
  misc_feature 15: note = RNA
  misc_feature 17: note = RNA
  misc_feature 19: note = RNA
  misc_feature 21: note = RNA
  misc_feature 12: note = DNA
  misc_feature 14: note = DNA
  misc_feature 16: note = DNA
  misc_feature 18: note = DNA
  misc_feature 20: note = DNA
atgtaaccaagagtattccat

SEQ ID NO: 68 - DNA, 21 bp, synthetic construct
  source 1..21: mol_type = other DNA
  modified_base 1: mod_base = OTHER; note = 2'-O-methyladenosine-3'-phosphate
  modified_base 4: mod_base = OTHER; note = 2'-O-methyluridine-3'-phosphate
  modified_base 5: mod_base = OTHER; note = 2'-O-methyladenosine-3'-phosphate
  modified_base 8: mod_base = OTHER; note = 2'-O-methylcytidine-3'-phosphate
  modified_base 9: mod_base = OTHER; note = 2'-O-methylcytidine-3'-phosphate
  modified_base 12: mod_base = OTHER; note = 2'-O-methyladenosine-3'-phosphate
  modified_base 13: mod_base = OTHER; note = 2'-O-methylguanosine-3'-phosphate
  modified_base 16: mod_base = OTHER; note = 2'-O-methyluridine-3'-phosphate
  modified_base 17: mod_base = OTHER; note = 2'-O-methyluridine-3'-phosphate
  modified_base 20: mod_base = OTHER; note = 2'-O-methyladenosine-3'-phosphorothioate
  modified_base 21: mod_base = OTHER; note = 2'-O-methyluridine
  misc_feature 1: note = RNA
  misc_feature 4..5: note = RNA
  misc_feature 8..9: note = RNA
  misc_feature 12..13: note = RNA
  misc_feature 16..17: note = RNA
  misc_feature 20..21: note = RNA
  misc_feature 2..3: note = DNA
  misc_feature 6..7: note = DNA
  misc_feature 10..11: note = DNA
  misc_feature 14..15: note = DNA
  misc_feature 18..19: note = DNA
atgtaacccagagtattccat

SEQ ID NO: 69 - DNA, 21 bp, synthetic construct
  source 1..21: mol_type = other DNA
  modified_base 1: mod_base = OTHER; note = 2'-deoxy-2'-fluoroadenosine-3'-phosphate
  modified_base 2: mod_base = OTHER; note = 2'-O-methyluridine-3'-phosphate
  modified_base 3: mod_base = OTHER; note = 2'-deoxy-2'-fluoroguanosine-3'-phosphate
  modified_base 4: mod_base = OTHER; note = 2'-O-methyluridine-3'-phosphate
  modified_base 5: mod_base = OTHER; note = 2'-deoxy-2'-fluoroadenosine-3'-phosphate
  modified_base 6: mod_base = OTHER; note = 2'-O-methyladenosine-3'-phosphate
  modified_base 7: mod_base = OTHER; note = 2'-deoxy-2'-fluorocytidine-3'-phosphate
  modified_base 8: mod_base = OTHER; note = 2'-O-methylcytidine-3'-phosphate
  modified_base 9: mod_base = OTHER; note = 2'-deoxy-2'-fluoroadenosine-3'-phosphate
  modified_base 10: mod_base = OTHER; note = 2'-O-methyladenosine-3'-phosphate
  modified_base 11: mod_base = OTHER; note = 2'-deoxy-2'-fluoroguanosine-3'-phosphate
  modified_base 12: mod_base = OTHER; note = 2'-O-methyladenosine-3'-phosphate
  modified_base 13: mod_base = OTHER; note = 2'-deoxy-2'-fluoroguanosine-3'-phosphate
  modified_base 16: mod_base = OTHER; note = 2'-O-methyluridine-3'-phosphate
  modified_base 17: mod_base = OTHER; note = 2'-deoxy-2'-fluorouridine-3'-phosphate
  modified_base 18: mod_base = OTHER; note = 2'-O-methylcytidine-3'-phosphate
  modified_base 20: mod_base = OTHER; note = 2'-deoxyadenosine-3'-phosphorothioate
  modified_base 21: mod_base = OTHER; note = 2'-deoxy-2'-fluorouridine
  misc_feature 1..13: note = RNA
  misc_feature 16..18: note = RNA
  misc_feature 21: note = RNA
  misc_feature 14..15: note = DNA
  misc_feature 19..20: note = DNA
atgtaaccaagagtattccat

SEQ ID NO: 70 - DNA, 21 bp, synthetic construct
  source 1..21: mol_type = other DNA
  modified_base 1: mod_base = OTHER; note = 2'-deoxy-2'-fluoroadenosine-3'-phosphate
  modified_base 2: mod_base = OTHER; note = 2'-O-methyluridine-3'-phosphate
  modified_base 3: mod_base = OTHER; note = 2'-O-methylguanosine-3'-phosphate
  modified_base 4: mod_base = OTHER; note = 2'-O-methyluridine-3'-phosphate
  modified_base 5: mod_base = OTHER; note = 2'-deoxy-2'-fluoroadenosine-3'-phosphate
  modified_base 6: mod_base = OTHER; note = 2'-O-methyladenosine-3'-phosphate
  modified_base 7: mod_base = OTHER; note = 2'-O-methylcytidine-3'-phosphate
  modified_base 8: mod_base = OTHER; note = 2'-O-methylcytidine-3'-phosphate
  modified_base 9: mod_base = OTHER; note = 2'-deoxy-2'-fluoroadenosine-3'-phosphate
  modified_base 10: mod_base = OTHER; note = 2'-O-methyladenosine-3'-phosphate
  modified_base 11: mod_base = OTHER; note = 2'-deoxy-2'-fluoroguanosine-3'-phosphate
  modified_base 12: mod_base = OTHER; note = 2'-O-methyladenosine-3'-phosphate
  modified_base 13: mod_base = OTHER; note = 2'-deoxy-2'-fluoroguanosine-3'-phosphate
  modified_base 15: mod_base = OTHER; note = adenosine-3'-phosphate
  modified_base 17: mod_base = OTHER; note = 2'-O-methyluridine-3'-phosphate
  modified_base 19: mod_base = OTHER; note = 2'-O-methylcytidine-3'-phosphate
  modified_base 20: mod_base = OTHER; note = 2'-deoxyadenosine-3'-phosphorothioate
  modified_base 21: mod_base = OTHER; note = 2'-O-methyluridine
  misc_feature 1..13: note = RNA
  misc_feature 15: note = RNA
  misc_feature 17: note = RNA
  misc_feature 19: note = RNA
  misc_feature 21: note = RNA
  misc_feature 14: note = DNA
  misc_feature 16: note = DNA
  misc_feature 18: note = DNA
  misc_feature 20: note = DNA
atgtaaccaagagtattccat

SEQ ID NO: 71 - DNA, 21 bp, synthetic construct
  source 1..21: mol_type = other DNA
  modified_base 1: mod_base = OTHER; note = 2'-deoxy-2'-fluoroadenosine-3'-phosphate
  modified_base 2: mod_base = OTHER; note = 2'-O-methyluridine-3'-phosphate
  modified_base 3: mod_base = OTHER; note = 2'-deoxy-2'-fluoroguanosine-3'-phosphate
  modified_base 4: mod_base = OTHER; note = 2'-O-methyluridine-3'-phosphate
  modified_base 5: mod_base = OTHER; note = 2'-deoxy-2'-fluoroadenosine-3'-phosphate
  modified_base 6: mod_base = OTHER; note = 2'-O-methyladenosine-3'-phosphate
  modified_base 7: mod_base = OTHER; note = 2'-deoxy-2'-fluorocytidine-3'-phosphate
  modified_base 8: mod_base = OTHER; note = 2'-O-methylcytidine-3'-phosphate
  modified_base 9: mod_base = OTHER; note = 2'-deoxy-2'-fluoroadenosine-3'-phosphate
  modified_base 10: mod_base = OTHER; note = 2'-O-methyladenosine-3'-phosphate
  modified_base 11: mod_base = OTHER; note = 2'-deoxy-2'-fluoroguanosine-3'-phosphate
  modified_base 12: mod_base = OTHER; note = 2'-O-methyladenosine-3'-phosphate
  modified_base 13: mod_base = OTHER; note = 2'-deoxy-2'-fluoroguanosine-3'-phosphate
  modified_base 14: mod_base = OTHER; note = 2'-O-methyluridine-3'-phosphate
  modified_base 17: mod_base = OTHER; note = 2'-deoxy-2'-fluorouridine-3'-phosphate
  modified_base 18: mod_base = OTHER; note = 2'-O-methylcytidine-3'-phosphate
  modified_base 20: mod_base = OTHER; note = 2'-deoxyadenosine-3'-phosphorothioate
  modified_base 21: mod_base = OTHER; note = 2'-deoxy-2'-fluorouridine
  misc_feature 1..14: note = RNA
  misc_feature 17..18: note = RNA
  misc_feature 21: note = RNA
  misc_feature 15..16: note = DNA
  misc_feature 19..20: note = DNA
atgtaaccaagagtattccat

SEQ ID NO: 72 - DNA, 21 bp, synthetic construct
  source 1..21: mol_type = other DNA
  modified_base 1: mod_base = OTHER; note = 2'-deoxy-2'-fluoroadenosine-3'-phosphate
  modified_base 2: mod_base = OTHER; note = 2'-O-methyluridine-3'-phosphate
  modified_base 3: mod_base = OTHER; note = 2'-O-methylguanosine-3'-phosphate
  modified_base 4: mod_base = OTHER; note = 2'-O-methyluridine-3'-phosphate
  modified_base 5: mod_base = OTHER; note = 2'-deoxy-2'-fluoroadenosine-3'-phosphate
  modified_base 6: mod_base = OTHER; note = 2'-O-methyladenosine-3'-phosphate
  modified_base 7: mod_base = OTHER; note = 2'-O-methylcytidine-3'-phosphate
  modified_base 8: mod_base = OTHER; note = 2'-O-methylcytidine-3'-phosphate
  modified_base 9: mod_base = OTHER; note = 2'-deoxy-2'-fluoroadenosine-3'-phosphate
  modified_base 10: mod_base = OTHER; note = 2'-O-methyladenosine-3'-phosphate
  modified_base 11: mod_base = OTHER; note = 2'-deoxy-2'-fluoroguanosine-3'-phosphate
  modified_base 12: mod_base = OTHER; note = 2'-O-methyladenosine-3'-phosphate
  modified_base 13: mod_base = OTHER; note = 2'-deoxy-2'-fluoroguanosine-3'-phosphate
  modified_base 15: mod_base = OTHER; note = adenosine-3'-phosphate
  modified_base 17: mod_base = OTHER; note = uridine-3'-phosphate
  modified_base 19: mod_base = OTHER; note = 2'-O-methylcytidine-3'-phosphate
  modified_base 20: mod_base = OTHER; note = 2'-deoxyadenosine-3'-phosphorothioate
  modified_base 21: mod_base = OTHER; note = 2'-O-methyluridine
  misc_feature 1..13: note = RNA
  misc_feature 15: note = RNA
  misc_feature 17: note = RNA
  misc_feature 19: note = RNA
  misc_feature 21: note = RNA
  misc_feature 14: note = DNA
  misc_feature 16: note = DNA
  misc_feature 18: note = DNA
  misc_feature 20: note = DNA
atgtaaccaagagtattccat

SEQ ID NO: 73 - DNA, 21 bp, synthetic construct
  source 1..21: mol_type = other DNA
  modified_base 1: mod_base = OTHER; note = 2'-deoxy-2'-fluoroadenosine-3'-phosphate
  modified_base 2: mod_base = OTHER; note = 2'-O-methyluridine-3'-phosphate
  modified_base 3: mod_base = OTHER; note = 2'-O-methylguanosine-3'-phosphate
  modified_base 4: mod_base = OTHER; note = 2'-O-methyluridine-3'-phosphate
  modified_base 5: mod_base = OTHER; note = 2'-deoxy-2'-fluoroadenosine-3'-phosphate
  modified_base 6: mod_base = OTHER; note = 2'-O-methyladenosine-3'-phosphate
  modified_base 7: mod_base = OTHER; note = 2'-O-methylcytidine-3'-phosphate
  modified_base 8: mod_base = OTHER; note = 2'-O-methylcytidine-3'-phosphate
  modified_base 9: mod_base = OTHER; note = 2'-deoxy-2'-fluoroadenosine-3'-phosphate
  modified_base 10: mod_base = OTHER; note = 2'-O-methyladenosine-3'-phosphate
  modified_base 11: mod_base = OTHER; note = 2'-deoxy-2'-fluoroguanosine-3'-phosphate
  modified_base 12: mod_base = OTHER; note = 2'-O-methyladenosine-3'-phosphate
  modified_base 13: mod_base = OTHER; note = 2'-deoxy-2'-fluoroguanosine-3'-phosphate
  modified_base 15: mod_base = OTHER; note = adenosine-3'-phosphate
  modified_base 17: mod_base = OTHER; note = uridine-3'-phosphate
  modified_base 19: mod_base = OTHER; note = 2'-O-methylcytidine-3'-phosphate
  modified_base 20: mod_base = OTHER; note = 2'-deoxyadenosine-3'-phosphorothioate
  modified_base 21: mod_base = OTHER; note = 2'-O-methyluridine
  misc_feature 1..13: note = RNA
  misc_feature 15: note = RNA
  misc_feature 17: note = RNA
  misc_feature 19: note = RNA
  misc_feature 21: note = RNA
  misc_feature 14: note = DNA
  misc_feature 16: note = DNA
  misc_feature 18: note = DNA
  misc_feature 20: note = DNA
atgtaaccaagagtattccat

SEQ ID NO: 74 - RNA, 21 nt, synthetic construct
  source 1..21: mol_type = other RNA
  modified_base 1: mod_base = OTHER; note = 2'-O-methyladenosine-3'-phosphate
  modified_base 2: mod_base = OTHER; note = 2'-deoxy-2'-fluorouridine-3'-phosphate
  modified_base 3: mod_base = OTHER; note = 2'-deoxy-2'-fluoroguanosine-3'-phosphate
  modified_base 4: mod_base = OTHER; note = 2'-O-methyluridine-3'-phosphate
  modified_base 5: mod_base = OTHER; note = 2'-O-methyladenosine-3'-phosphate
  modified_base 6: mod_base = OTHER; note = 2'-deoxy-2'-fluoroadenosine-3'-phosphate
  modified_base 7: mod_base = OTHER; note = 2'-deoxy-2'-fluorocytidine-3'-phosphate
  modified_base 8: mod_base = OTHER; note = 2'-O-methylcytidine-3'-phosphate
  modified_base 9: mod_base = OTHER; note = 2'-O-methylcytidine-3'-phosphate
  modified_base 10: mod_base = OTHER; note = 2'-deoxy-2'-fluoroadenosine-3'-phosphate
  modified_base 11: mod_base = OTHER; note = 2'-deoxy-2'-fluoroguanosine-3'-phosphate
  modified_base 12: mod_base = OTHER; note = 2'-O-methyladenosine-3'-phosphate
  modified_base 13: mod_base = OTHER; note = 2'-O-methylguanosine-3'-phosphate
  modified_base 14: mod_base = OTHER; note = 2'-deoxy-2'-fluorouridine-3'-phosphate
  modified_base 15: mod_base = OTHER; note = 2'-deoxy-2'-fluoroadenosine-3'-phosphate
  modified_base 16: mod_base = OTHER; note = 2'-O-methyluridine-3'-phosphate
  modified_base 17: mod_base = OTHER; note = 2'-O-methyluridine-3'-phosphate
  modified_base 18: mod_base = OTHER; note = 2'-deoxy-2'-fluorocytidine-3'-phosphate
  modified_base 19: mod_base = OTHER; note = 2'-deoxy-2'-fluorocytidine-3'-phosphate
  modified_base 20: mod_base = OTHER; note = 2'-O-methyladenosine-3'-phosphorothioate
  modified_base 21: mod_base = OTHER; note = 2'-O-methyluridine
atgtaacccagagtattccat

SEQ ID NO: 75 - RNA, 21 nt, synthetic construct
  source 1..21: mol_type = other RNA
  modified_base 1: mod_base = OTHER; note = 2'-deoxy-2'-fluoroadenosine-3'-phosphate
  modified_base 2: mod_base = OTHER; note = 2'-O-methyluridine-3'-phosphate
  modified_base 3: mod_base = OTHER; note = 2'-deoxy-2'-fluoroguanosine-3'-phosphate
  modified_base 4: mod_base = OTHER; note = 2'-O-methyluridine-3'-phosphate
  modified_base 5: mod_base = OTHER; note = 2'-deoxy-2'-fluoroadenosine-3'-phosphate
  modified_base 6: mod_base = OTHER; note = 2'-O-methyladenosine-3'-phosphate
  modified_base 7: mod_base = OTHER; note = 2'-deoxy-2'-fluorocytidine-3'-phosphate
  modified_base 8: mod_base = OTHER; note = 2'-deoxy-2'-fluorocytidine-3'-phosphate
  modified_base 9: mod_base = OTHER; note = 2'-deoxy-2'-fluoroadenosine-3'-phosphate
  modified_base 10: mod_base = OTHER; note = 2'-O-methyladenosine-3'-phosphate
  modified_base 11: mod_base = OTHER; note = 2'-deoxy-2'-fluoroguanosine-3'-phosphate
  modified_base 12: mod_base = OTHER; note = 2'-O-methyladenosine-3'-phosphate
  modified_base 13: mod_base = OTHER; note = 2'-O-methylguanosine-3'-phosphate
  modified_base 14: mod_base = OTHER; note = 2'-O-methyluridine-3'-phosphate
  modified_base 15: mod_base = OTHER; note = 2'-deoxy-2'-fluoroadenosine-3'-phosphate
  modified_base 16: mod_base = OTHER; note = 2'-O-methyluridine-3'-phosphate
  modified_base 17: mod_base = OTHER; note = 2'-deoxy-2'-fluorouridine-3'-phosphate
  modified_base 18: mod_base = OTHER; note = 2'-O-methylcytidine-3'-phosphate
  modified_base 19: mod_base = OTHER; note = 2'-deoxy-2'-fluorocytidine-3'-phosphate
  modified_base 20: mod_base = OTHER; note = 2'-O-methyladenosine-3'-phosphorothioate
  modified_base 21: mod_base = OTHER; note = 2'-deoxy-2'-fluorouridine
atgtaaccaagagtattccat

SEQ ID NO: 76 - RNA, 21 nt, synthetic construct
  source 1..21: mol_type = other RNA
  modified_base 1: mod_base = OTHER; note = 2'-deoxy-2'-fluorouridine-3'-phosphate
  modified_base 2: mod_base = OTHER; note = 2'-O-methylguanosine-3'-phosphate
  modified_base 3: mod_base = OTHER; note = 2'-deoxy-2'-fluoroguanosine-3'-phosphate
  modified_base 4: mod_base = OTHER; note = 2'-O-methylguanosine-3'-phosphate
  modified_base 5: mod_base = OTHER; note = 2'-deoxy-2'-fluoroadenosine-3'-phosphate
  modified_base 6: mod_base = OTHER; note = 2'-O-methyluridine-3'-phosphate
  modified_base 7: mod_base = OTHER; note = 2'-O-methyluridine-3'-phosphate
  modified_base 8: mod_base = OTHER; note = 2'-O-methyluridine-3'-phosphate
  modified_base 9: mod_base = OTHER; note = 2'-deoxy-2'-fluorocytidine-3'-phosphate
  modified_base 10: mod_base = OTHER; note = 2'-O-methyladenosine-3'-phosphate
  modified_base 11: mod_base = OTHER; note = 2'-deoxy-2'-fluorouridine-3'-phosphate
  modified_base 12: mod_base = OTHER; note = 2'-O-methylguanosine-3'-phosphate
  modified_base 13: mod_base = OTHER; note = 2'-deoxy-2'-fluorouridine-3'-phosphate
  modified_base 14: mod_base = OTHER; note = 2'-O-methyladenosine-3'-phosphate
  modified_base 15: mod_base = OTHER; note = 2'-deoxy-2'-fluoroadenosine-3'-phosphate
  modified_base 16: mod_base = OTHER; note = 2'-O-methylcytidine-3'-phosphate
  modified_base 17: mod_base = OTHER; note = 2'-deoxy-2'-fluorocytidine-3'-phosphate
  modified_base 18: mod_base = OTHER; note = 2'-O-methyladenosine-3'-phosphate
  modified_base 19: mod_base = OTHER; note = 2'-deoxy-2'-fluoroadenosine-3'-phosphate
  modified_base 20: mod_base = OTHER; note = 2'-O-methylguanosine-3'-phosphorothioate
  modified_base 21: mod_base = OTHER; note = 2'-deoxy-2'-fluoroadenosine
tgggatttcatgtaaccaaga

SEQ ID NO: 77 - RNA, 21 nt, synthetic construct
  source 1..21: mol_type = other RNA
  modified_base 1: mod_base = OTHER; note = 2'-deoxy-2'-fluoroadenosine-3'-phosphate
  modified_base 2: mod_base = OTHER; note = 2'-O-methyluridine-3'-phosphate
  modified_base 3: mod_base = OTHER; note = 2'-deoxy-2'-fluoroguanosine-3'-phosphate
  modified_base 4: mod_base = OTHER; note = 2'-O-methyluridine-3'-phosphate
  modified_base 5: mod_base = OTHER; note = 2'-deoxy-2'-fluoroadenosine-3'-phosphate
  modified_base 6: mod_base = OTHER; note = 2'-O-methyladenosine-3'-phosphate
  modified_base 7: mod_base = OTHER; note = 2'-deoxy-2'-fluorocytidine-3'-phosphate
  modified_base 8: mod_base = OTHER; note = 2'-O-methylcytidine-3'-phosphate
  modified_base 9: mod_base = OTHER; note = 2'-deoxy-2'-fluoroadenosine-3'-phosphate
  modified_base 10: mod_base = OTHER; note = 2'-O-methyladenosine-3'-phosphate
  modified_base 11: mod_base = OTHER; note = 2'-deoxy-2'-fluoroguanosine-3'-phosphate
  modified_base 12: mod_base = OTHER; note = 2'-deoxy-2'-fluoroadenosine-3'-phosphate
  modified_base 13: mod_base = OTHER; note = 2'-deoxy-2'-fluoroguanosine-3'-phosphate
  modified_base 14: mod_base = OTHER; note = 2'-O-methyluridine-3'-phosphate
  modified_base 15: mod_base = OTHER; note = 2'-O-methyladenosine-3'-phosphate
  modified_base 16: mod_base = OTHER; note = 2'-O-methyluridine-3'-phosphate
  modified_base 17: mod_base = OTHER; note = 2'-deoxy-2'-fluorouridine-3'-phosphate
  modified_base 18: mod_base = OTHER; note = 2'-O-methylcytidine-3'-phosphate
  modified_base 19: mod_base = OTHER; note = 2'-deoxy-2'-fluorocytidine-3'-phosphate
  modified_base 20: mod_base = OTHER; note = 2'-O-methyladenosine-3'-phosphorothioate
  modified_base 21: mod_base = OTHER; note = 2'-deoxy-2'-fluorouridine
atgtaaccaagagtattccat

SEQ ID NO: 78 - DNA, 21 bp, synthetic construct
  source 1..21: mol_type = other DNA
  modified_base 1: mod_base = OTHER; note = 2'-deoxy-2'-fluoroadenosine-3'-phosphate
  modified_base 2: mod_base = OTHER; note = 2'-O-methyluridine-3'-phosphate
  modified_base 3: mod_base = OTHER; note = 2'-deoxy-2'-fluoroguanosine-3'-phosphate
  modified_base 4: mod_base = OTHER; note = 2'-O-methyluridine-3'-phosphate
  modified_base 5: mod_base = OTHER; note = 2'-deoxy-2'-fluoroadenosine-3'-phosphate
  modified_base 6: mod_base = OTHER; note = 2'-O-methyladenosine-3'-phosphate
  modified_base 7: mod_base = OTHER; note = 2'-deoxy-2'-fluorocytidine-3'-phosphate
  modified_base 8: mod_base = OTHER; note = 2'-O-methylcytidine-3'-phosphate
  modified_base 9: mod_base = OTHER; note = 2'-deoxy-2'-fluoroadenosine-3'-phosphate
  modified_base 10: mod_base = OTHER; note = 2'-O-methyladenosine-3'-phosphate
  modified_base 11: mod_base = OTHER; note = 2'-deoxy-2'-fluoroguanosine-3'-phosphate
  modified_base 12: mod_base = OTHER; note = 2'-O-methyladenosine-3'-phosphate
  modified_base 17: mod_base = OTHER; note = 2'-deoxy-2'-fluorouridine-3'-phosphate
  modified_base 18: mod_base = OTHER; note = 2'-O-methylcytidine-3'-phosphate
  modified_base 19: mod_base = OTHER; note = 2'-deoxy-2'-fluorocytidine-3'-phosphate
  modified_base 20: mod_base = OTHER; note = 2'-O-methyladenosine-3'-phosphorothioate
  modified_base 21: mod_base = OTHER; note = 2'-deoxy-2'-fluorouridine
  misc_feature 1..12: note = RNA
  misc_feature 17..21: note = RNA
  misc_feature 13..16: note = DNA
atgtaaccaagagtattccat

SEQ ID NO: 79 - RNA, 21 nt, synthetic construct
  source 1..21: mol_type = other RNA
  modified_base 1: mod_base = OTHER; note = 2'-deoxy-2'-fluoroadenosine-3'-phosphate
  modified_base 2: mod_base = OTHER; note = 2'-deoxy-2'-fluorouridine-3'-phosphate
  modified_base 3: mod_base = OTHER; note = 2'-O-methylguanosine-3'-phosphate
  modified_base 4: mod_base = OTHER; note = 2'-O-methyluridine-3'-phosphate
  modified_base 5: mod_base = OTHER; note = 2'-deoxy-2'-fluoroadenosine-3'-phosphate
  modified_base 6: mod_base = OTHER; note = 2'-deoxy-2'-fluoroadenosine-3'-phosphate
  modified_base 7: mod_base = OTHER; note = 2'-O-methylcytidine-3'-phosphate
  modified_base 8: mod_base = OTHER; note = 2'-O-methylcytidine-3'-phosphate
  modified_base 9: mod_base = OTHER; note = 2'-deoxy-2'-fluoroadenosine-3'-phosphate
  modified_base 10: mod_base = OTHER; note = 2'-deoxy-2'-fluoroadenosine-3'-phosphate
  modified_base 11: mod_base = OTHER; note = 2'-O-methylguanosine-3'-phosphate
  modified_base 12: mod_base = OTHER; note = 2'-O-methyladenosine-3'-phosphate
  modified_base 13: mod_base = OTHER; note = 2'-deoxy-2'-fluoroguanosine-3'-phosphate
  modified_base 14: mod_base = OTHER; note = 2'-deoxy-2'-fluorouridine-3'-phosphate
  modified_base 15: mod_base = OTHER; note = 2'-O-methyladenosine-3'-phosphate
  modified_base 16: mod_base = OTHER; note = 2'-O-methyluridine-3'-phosphate
  modified_base 17: mod_base = OTHER; note = 2'-deoxy-2'-fluorouridine-3'-phosphate
  modified_base 18: mod_base = OTHER; note = 2'-deoxy-2'-fluorocytidine-3'-phosphate
  modified_base 19: mod_base = OTHER; note = 2'-O-methylcytidine-3'-phosphate
  modified_base 20: mod_base = OTHER; note = 2'-O-methyladenosine-3'-phosphorothioate
  modified_base 21: mod_base = OTHER; note = 2'-deoxy-2'-fluorouridine
atgtaaccaagagtattccat

SEQ ID NO: 80 - RNA, 21 nt, synthetic construct
  source 1..21: mol_type = other RNA
  modified_base 1: mod_base = OTHER; note = 2'-deoxy-2'-fluoroadenosine-3'-phosphate
  modified_base 2: mod_base = OTHER; note = 2'-O-methyluridine-3'-phosphate
  modified_base 3: mod_base = OTHER; note = 2'-deoxy-2'-fluoroguanosine-3'-phosphate
  modified_base 4: mod_base = OTHER; note = 2'-O-methyluridine-3'-phosphate
  modified_base 5: mod_base = OTHER; note = 2'-deoxy-2'-fluoroadenosine-3'-phosphate
  modified_base 6: mod_base = OTHER; note = 2'-O-methyladenosine-3'-phosphate
  modified_base 7: mod_base = OTHER; note = 2'-deoxy-2'-fluorocytidine-3'-phosphate
  modified_base 8: mod_base = OTHER; note = 2'-O-methylcytidine-3'-phosphate
  modified_base 9: mod_base = OTHER; note = 2'-deoxy-2'-fluoroadenosine-3'-phosphate
  modified_base 10: mod_base = OTHER; note = 2'-O-methyladenosine-3'-phosphate
  modified_base 11: mod_base = OTHER; note = 2'-deoxy-2'-fluoroguanosine-3'-phosphate
  modified_base 12: mod_base = OTHER; note = 2'-O-methyladenosine-3'-phosphate
  modified_base 13: mod_base = OTHER; note = 2'-deoxy-2'-fluoroguanosine-3'-phosphate
  modified_base 14: mod_base = OTHER; note = 2'-O-methyluridine-3'-phosphate
  modified_base 15: mod_base = OTHER; note = 2'-deoxy-2'-fluoroadenosine-3'-phosphate
  modified_base 16: mod_base = OTHER; note = 2'-O-methyluridine-3'-phosphate
  modified_base 17: mod_base = OTHER; note = 2'-deoxy-2'-fluorouridine-3'-phosphate
  modified_base 18: mod_base = OTHER; note = 2'-O-methylcytidine-3'-phosphate
  modified_base 19: mod_base = OTHER; note = 2'-deoxy-2'-fluorocytidine-3'-phosphate
  modified_base 20: mod_base = OTHER; note = 2'-O-methyladenosine-3'-phosphorothioate
  modified_base 21: mod_base = OTHER; note = 2'-deoxy-2'-fluorouridine
atgtaaccaagagtattccat

SEQ ID NO: 81 - DNA, 21 bp, synthetic construct
  source 1..21: mol_type = other DNA
  modified_base 1: mod_base = OTHER; note = 2'-deoxy-2'-fluoroadenosine-3'-phosphate
  modified_base 2: mod_base = OTHER; note = 2'-O-methyluridine-3'-phosphate
  modified_base 3: mod_base = OTHER; note = 2'-deoxy-2'-fluoroguanosine-3'-phosphate
  modified_base 4: mod_base = OTHER; note = 2'-O-methyluridine-3'-phosphate
  modified_base 5: mod_base = OTHER; note = 2'-deoxy-2'-fluoroadenosine-3'-phosphate
  modified_base 6: mod_base = OTHER; note = 2'-O-methyladenosine-3'-phosphate
  modified_base 7: mod_base = OTHER; note = 2'-deoxy-2'-fluorocytidine-3'-phosphate
  modified_base 8: mod_base = OTHER; note = 2'-O-methylcytidine-3'-phosphate
  modified_base 9: mod_base = OTHER; note = 2'-deoxy-2'-fluoroadenosine-3'-phosphate
  modified_base 10: mod_base = OTHER; note = 2'-O-methyladenosine-3'-phosphate
  modified_base 11: mod_base = OTHER; note = 2'-deoxy-2'-fluoroguanosine-3'-phosphate
  modified_base 12: mod_base = OTHER; note = 2'-O-methyladenosine-3'-phosphate
  modified_base 13: mod_base = OTHER; note = 2'-deoxy-2'-fluoroguanosine-3'-phosphate
  modified_base 14: mod_base = OTHER; note = 2'-O-methyluridine-3'-phosphate
  modified_base 19: mod_base = OTHER; note = 2'-deoxy-2'-fluorocytidine-3'-phosphate
  modified_base 20: mod_base = OTHER; note = 2'-O-methyladenosine-3'-phosphorothioate
  modified_base 21: mod_base = OTHER; note = 2'-deoxy-2'-fluorouridine
  misc_feature 1..14: note = RNA
  misc_feature 19..21: note = RNA
  misc_feature 15..18: note = DNA
atgtaaccaagagtattccat

SEQ ID NO: 82 - RNA, 21 nt, synthetic construct
  source 1..21: mol_type = other RNA
  modified_base 1: mod_base = OTHER; note = 2'-deoxy-2'-fluoroadenosine-3'-phosphate
  modified_base 2: mod_base = OTHER; note = 2'-O-methyluridine-3'-phosphate
  modified_base 3: mod_base = OTHER; note = 2'-deoxy-2'-fluoroguanosine-3'-phosphate
  modified_base 4: mod_base = OTHER; note = 2'-O-methyluridine-3'-phosphate
  modified_base 5: mod_base = OTHER; note = 2'-deoxy-2'-fluoroadenosine-3'-phosphate
  modified_base 6: mod_base = OTHER; note = 2'-O-methyladenosine-3'-phosphate
  modified_base 7: mod_base = OTHER; note = 2'-deoxy-2'-fluorocytidine-3'-phosphate
  modified_base 8: mod_base = OTHER; note = 2'-O-methylcytidine-3'-phosphate
  modified_base 9: mod_base = OTHER; note = 2'-deoxy-2'-fluoroadenosine-3'-phosphate
  modified_base 10: mod_base = OTHER; note = 2'-O-methyladenosine-3'-phosphate
  modified_base 11: mod_base = OTHER; note = 2'-deoxy-2'-fluoroguanosine-3'-phosphate
  modified_base 12: mod_base = OTHER; note = 2'-O-methyladenosine-3'-phosphate
  modified_base 13: mod_base = OTHER; note = 2'-deoxy-2'-fluoroguanosine-3'-phosphate
  modified_base 14: mod_base = OTHER; note = 2'-O-methyluridine-3'-phosphate
  modified_base 15: mod_base = OTHER; note = 2'-deoxy-2'-fluoroadenosine-3'-phosphate
  modified_base 16: mod_base = OTHER; note = 2'-O-methyluridine-3'-phosphate
  modified_base 17: mod_base = OTHER; note = 2'-deoxy-2'-fluorouridine-3'-phosphate
  modified_base 18: mod_base = OTHER; note = 2'-O-methylcytidine-3'-phosphate
  modified_base 19: mod_base = OTHER; note = 2'-deoxy-2'-fluorocytidine-3'-phosphate
  modified_base 20: mod_base = OTHER; note = 2'-O-methyladenosine-3'-phosphorothioate
  modified_base 21: mod_base = OTHER; note = 2'-O-methyluridine
atgtaaccaagagtattccat

SEQ ID NO: 83 - RNA, 21 nt, synthetic construct
  source 1..21: mol_type = other RNA
  modified_base 1: mod_base = OTHER; note = 2'-deoxy-2'-fluoroadenosine-3'-phosphate
  modified_base 2: mod_base = OTHER; note = 2'-O-methyluridine-3'-phosphate
  modified_base 3: mod_base = OTHER; note = 2'-deoxy-2'-fluoroguanosine-3'-phosphate
  modified_base 4: mod_base = OTHER; note = 2'-O-methyluridine-3'-phosphate
  modified_base 5: mod_base = OTHER; note = 2'-deoxy-2'-fluoroadenosine-3'-phosphate
  modified_base 6: mod_base = OTHER; note = 2'-O-methyladenosine-3'-phosphate
  modified_base 7: mod_base = OTHER; note = 2'-deoxy-2'-fluorocytidine-3'-phosphate
  modified_base 8: mod_base = OTHER; note = 2'-O-methylcytidine-3'-phosphate
  modified_base 9: mod_base = OTHER; note = 2'-deoxy-2'-fluoroadenosine-3'-phosphate
  modified_base 10: mod_base = OTHER; note = 2'-O-methyladenosine-3'-phosphate
  modified_base 11: mod_base = OTHER; note = 2'-deoxy-2'-fluoroguanosine-3'-phosphate
  modified_base 12: mod_base = OTHER; note = 2'-O-methyladenosine-3'-phosphate
  modified_base 13: mod_base = OTHER; note = 2'-deoxy-2'-fluoroguanosine-3'-phosphate
  modified_base 14: mod_base = OTHER; note = 2'-O-methyluridine-3'-phosphate
  modified_base 15: mod_base = OTHER; note = 2'-deoxy-2'-fluoroadenosine-3'-phosphate
  modified_base 16: mod_base = OTHER; note = 2'-O-methyluridine-3'-phosphate
  modified_base 17: mod_base = OTHER; note = 2'-deoxy-2'-fluorouridine-3'-phosphate
  modified_base 18: mod_base = OTHER; note = 2'-O-methylcytidine-3'-phosphate
  modified_base 19: mod_base = OTHER; note = 2'-deoxy-2'-fluorocytidine-3'-phosphate
  modified_base 20: mod_base = OTHER; note = 2'-O-methyladenosine-3'-phosphorothioate
  modified_base 21: mod_base = OTHER; note = 2'-deoxy-2'-fluorouridine
atgtaaccaagagtattccat

SEQ ID NO: 84 - DNA, 21 bp, synthetic construct
  source 1..21: mol_type = other DNA
  modified_base 1: mod_base = OTHER; note = 2'-deoxy-2'-fluoroadenosine-3'-phosphate
  modified_base 2: mod_base = OTHER; note = 2'-O-methyluridine-3'-phosphate
  modified_base 3: mod_base = OTHER; note = 2'-O-methylguanosine-3'-phosphate
  modified_base 4: mod_base = OTHER; note = 2'-O-methyluridine-3'-phosphate
  modified_base 5: mod_base = OTHER; note = 2'-deoxy-2'-fluoroadenosine-3'-phosphate
  modified_base 6: mod_base = OTHER; note = 2'-O-methyladenosine-3'-phosphate
  modified_base 7: mod_base = OTHER; note = 2'-O-methylcytidine-3'-phosphate
  modified_base 8: mod_base = OTHER; note = 2'-O-methylcytidine-3'-phosphate
  modified_base 9: mod_base = OTHER; note = 2'-deoxy-2'-fluoroadenosine-3'-phosphate
  modified_base 10: mod_base = OTHER; note = 2'-O-methyladenosine-3'-phosphate
  modified_base 11: mod_base = OTHER; note = 2'-deoxy-2'-fluoroguanosine-3'-phosphate
  modified_base 12: mod_base = OTHER; note = 2'-O-methyladenosine-3'-phosphate
  modified_base 13: mod_base = OTHER; note = 2'-deoxy-2'-fluoroguanosine-3'-phosphate
  modified_base 15: mod_base = OTHER; note = 2'-O-methyladenosine-3'-phosphate
  modified_base 17: mod_base = OTHER; note = 2'-O-methyluridine-3'-phosphate
  modified_base 19: mod_base = OTHER; note = 2'-O-methylcytidine-3'-phosphate
  modified_base 20: mod_base = OTHER; note = 2'-deoxyadenosine-3'-phosphorothioate
  modified_base 21: mod_base = OTHER; note = 2'-O-methyluridine
  misc_feature 1..13: note = RNA
  misc_feature 15: note = RNA
  misc_feature 17: note = RNA
  misc_feature 19: note = RNA
  misc_feature 21: note = RNA
  misc_feature 14: note = DNA
  misc_feature 16: note = DNA
  misc_feature 18: note = DNA
  misc_feature 20: note = DNA
atgtaaccaagagtattccat

SEQ ID NO: 85 - RNA, 21 nt, synthetic construct
  source 1..21: mol_type = other RNA
  modified_base 1: mod_base = OTHER; note = 2'-deoxy-2'-fluoroadenosine-3'-phosphate
  modified_base 2: mod_base = OTHER; note = 2'-O-methyluridine-3'-phosphate
  modified_base 3: mod_base = OTHER; note = 2'-deoxy-2'-fluoroguanosine-3'-phosphate
  modified_base 4: mod_base = OTHER; note = 2'-O-methyluridine-3'-phosphate
  modified_base 5: mod_base = OTHER; note = 2'-deoxy-2'-fluoroadenosine-3'-phosphate
  modified_base 6: mod_base = OTHER; note = 2'-O-methyladenosine-3'-phosphate
  modified_base 7: mod_base = OTHER; note = 2'-deoxy-2'-fluorocytidine-3'-phosphate
  modified_base 8: mod_base = OTHER; note = 2'-O-methylcytidine-3'-phosphate
  modified_base 9: mod_base = OTHER; note = 2'-deoxy-2'-fluoroadenosine-3'-phosphate
  modified_base 10: mod_base = OTHER; note = 2'-O-methyladenosine-3'-phosphate
  modified_base 11: mod_base = OTHER; note = 2'-deoxy-2'-fluoroguanosine-3'-phosphate
  modified_base 12: mod_base = OTHER; note = 2'-deoxy-2'-fluoroadenosine-3'-phosphate
  modified_base 13: mod_base = OTHER; note = 2'-deoxy-2'-fluoroguanosine-3'-phosphate
  modified_base 14: mod_base = OTHER; note = 2'-O-methyluridine-3'-phosphate
  modified_base 15: mod_base = OTHER; note = 2'-deoxy-2'-fluoroadenosine-3'-phosphate
  modified_base 16: mod_base = OTHER; note = 2'-O-methyluridine-3'-phosphate
  modified_base 17: mod_base = OTHER; note = 2'-O-methyluridine-3'-phosphate
  modified_base 18: mod_base = OTHER; note = 2'-O-methylcytidine-3'-phosphate
  modified_base 19: mod_base = OTHER; note = 2'-deoxy-2'-fluorocytidine-3'-phosphate
  modified_base 20: mod_base = OTHER; note = 2'-O-methyladenosine-3'-phosphorothioate
  modified_base 21: mod_base = OTHER; note = 2'-deoxy-2'-fluorouridine
atgtaaccaagagtattccat

SEQ ID NO: 86 - DNA, 21 bp, synthetic construct
  source 1..21: mol_type = other DNA
  modified_base 1: mod_base = OTHER; note = 2'-deoxy-2'-fluoroadenosine-3'-phosphate
  modified_base 2: mod_base = OTHER; note = 2'-O-methyluridine-3'-phosphate
  modified_base 3: mod_base = OTHER; note = 2'-deoxy-2'-fluoroguanosine-3'-phosphate
  modified_base 4: mod_base = OTHER; note = 2'-O-methyluridine-3'-phosphate
  modified_base 5: mod_base = OTHER; note = 2'-deoxy-2'-fluoroadenosine-3'-phosphate
  modified_base 6: mod_base = OTHER; note = 2'-O-methyladenosine-3'-phosphate
  modified_base 7: mod_base = OTHER; note = 2'-deoxy-2'-fluorocytidine-3'-phosphate
  modified_base 8: mod_base = OTHER; note = 2'-O-methylcytidine-3'-phosphate
  modified_base 9: mod_base = OTHER; note = 2'-deoxy-2'-fluoroadenosine-3'-phosphate
  modified_base 10: mod_base = OTHER; note = 2'-O-methyladenosine-3'-phosphate
  modified_base 11: mod_base = OTHER; note = 2'-deoxy-2'-fluoroguanosine-3'-phosphate
  modified_base 12: mod_base = OTHER; note = 2'-O-methyladenosine-3'-phosphate
  modified_base 13: mod_base = OTHER; note = 2'-deoxy-2'-fluoroguanosine-3'-phosphate
  modified_base 14: mod_base = OTHER; note = 2'-O-methyluridine-3'-phosphate
  modified_base 15: mod_base = OTHER; note = 2'-deoxy-2'-fluoroadenosine-3'-phosphate
  modified_base 16: mod_base = OTHER; note = 2'-O-methyluridine-3'-phosphate
  modified_base 17: mod_base = OTHER; note = 2'-deoxy-2'-fluorouridine-3'-phosphate
  modified_base 20: mod_base = OTHER; note = 2'-deoxyadenosine-3'-phosphorothioate
  misc_feature 1..17: note = RNA
  misc_feature 18..21: note = DNA
atgtaaccaagagtattccat

SEQ ID NO: 87 - RNA, 21 nt, synthetic construct
  source 1..21: mol_type = other RNA
  modified_base 1: mod_base = OTHER; note = 2'-deoxy-2'-fluoroadenosine-3'-phosphate
  modified_base 2: mod_base = OTHER; note = 2'-O-methyluridine-3'-phosphate
  modified_base 3: mod_base = OTHER; note = 2'-deoxy-2'-fluoroguanosine-3'-phosphate
  modified_base 4: mod_base = OTHER; note = 2'-O-methyluridine-3'-phosphate
  modified_base 5: mod_base = OTHER; note = 2'-deoxy-2'-fluoroadenosine-3'-phosphate
  modified_base 6: mod_base = OTHER; note = 2'-O-methyladenosine-3'-phosphate
  modified_base 7: mod_base = OTHER; note = 2'-O-methylcytidine-3'-phosphate
  modified_base 8: mod_base = OTHER; note = 2'-O-methylcytidine-3'-phosphate
  modified_base 9: mod_base = OTHER; note = 2'-O-methyladenosine-3'-phosphate
  modified_base 10: mod_base = OTHER; note = 2'-O-methyladenosine-3'-phosphate
  modified_base 11: mod_base = OTHER; note = 2'-O-methylguanosine-3'-phosphate
  modified_base 12: mod_base = OTHER; note = 2'-O-methyladenosine-3'-phosphate
  modified_base 13: mod_base = OTHER; note = 2'-O-methylguanosine-3'-phosphate
  modified_base 14: mod_base = OTHER; note = 2'-O-methyluridine-3'-phosphate
  modified_base 15: mod_base = OTHER; note = 2'-deoxy-2'-fluoroadenosine-3'-phosphate
  modified_base 16: mod_base = OTHER; note = 2'-O-methyluridine-3'-phosphate
  modified_base 17: mod_base = OTHER; note = 2'-deoxy-2'-fluorouridine-3'-phosphate
  modified_base 18: mod_base = OTHER; note = 2'-O-methylcytidine-3'-phosphate
  modified_base 19: mod_base = OTHER; note = 2'-deoxy-2'-fluorocytidine-3'-phosphate
  modified_base 20: mod_base = OTHER; note = 2'-O-methyladenosine-3'-phosphorothioate
  modified_base 21: mod_base = OTHER; note = 2'-deoxy-2'-fluorouridine
atgtaaccaagagtattccat

SEQ ID NO: 88 - RNA, 21 nt, synthetic construct
  source 1..21: mol_type = other RNA
  modified_base 1: mod_base = OTHER; note = 2'-deoxy-2'-fluoroadenosine-3'-phosphate
  modified_base 2: mod_base = OTHER; note = 2'-O-methyluridine-3'-phosphate
  modified_base 3: mod_base = OTHER; note = 2'-deoxy-2'-fluoroguanosine-3'-phosphate
  modified_base 4: mod_base = OTHER; note = 2'-O-methyluridine-3'-phosphate
  modified_base 5: mod_base = OTHER; note = 2'-deoxy-2'-fluoroadenosine-3'-phosphate
  modified_base 6: mod_base = OTHER; note = 2'-O-methyladenosine-3'-phosphate
  modified_base 7: mod_base = OTHER; note = 2'-deoxy-2'-fluorocytidine-3'-phosphate
  modified_base 8: mod_base = OTHER; note = 2'-O-methylcytidine-3'-phosphate
  modified_base 9: mod_base = OTHER; note = 2'-deoxy-2'-fluoroadenosine-3'-phosphate
  modified_base 10: mod_base = OTHER; note = 2'-O-methyladenosine-3'-phosphate
  modified_base 11: mod_base = OTHER; note = 2'-deoxy-2'-fluoroguanosine-3'-phosphate
  modified_base 12: mod_base = OTHER; note = 2'-O-methyladenosine-3'-phosphate
  modified_base 13: mod_base = OTHER; note = 2'-deoxy-2'-fluoroguanosine-3'-phosphate
  modified_base 14: mod_base = OTHER; note = 2'-O-methyluridine-3'-phosphate
  modified_base 15: mod_base = OTHER; note = 2'-deoxy-2'-fluoroadenosine-3'-phosphate
  modified_base 16: mod_base = OTHER; note = 2'-O-methyluridine-3'-phosphate
  modified_base 17: mod_base = OTHER; note = 2'-deoxy-2'-fluorouridine-3'-phosphate
  modified_base 18: mod_base = OTHER; note = 2'-O-methylcytidine-3'-phosphate
  modified_base 19: mod_base = OTHER; note = 2'-deoxy-2'-fluorocytidine-3'-phosphate
  modified_base 20: mod_base = OTHER; note = 2'-O-methyladenosine-3'-phosphorothioate
  modified_base 21: mod_base = OTHER; note = 2'-deoxy-2'-fluorouridine
atgtaaccaagagtattccat

SEQ ID NO: 89 - RNA, 21 nt, synthetic construct
  source 1..21: mol_type = other RNA
  modified_base 1: mod_base = OTHER; note = 2'-deoxy-2'-fluoroadenosine-3'-phosphate
  modified_base 2: mod_base = OTHER; note = 2'-O-methyluridine-3'-phosphate
  modified_base 3: mod_base = OTHER; note = 2'-deoxy-2'-fluoroguanosine-3'-phosphate
  modified_base 4: mod_base = OTHER; note = 2'-O-methyluridine-3'-phosphate
  modified_base 5: mod_base = OTHER; note = 2'-deoxy-2'-fluoroadenosine-3'-phosphate
  modified_base 6: mod_base = OTHER; note = 2'-deoxy-2'-fluoroadenosine-3'-phosphate
  modified_base 7: mod_base = OTHER; note = 2'-deoxy-2'-fluorocytidine-3'-phosphate
  modified_base 8: mod_base = OTHER; note = 2'-O-methylcytidine-3'-phosphate
  modified_base 9: mod_base = OTHER; note = 2'-deoxy-2'-fluoroadenosine-3'-phosphate
  modified_base 10: mod_base = OTHER; note = 2'-O-methyladenosine-3'-phosphate
  modified_base 11: mod_base = OTHER; note = 2'-deoxy-2'-fluoroguanosine-3'-phosphate
  modified_base 12: mod_base = OTHER; note = 2'-O-methyladenosine-3'-phosphate
  modified_base 13: mod_base = OTHER; note = 2'-deoxy-2'-fluoroguanosine-3'-phosphate
  modified_base 14: mod_base = OTHER; note = 2'-O-methyluridine-3'-phosphate
  modified_base 15: mod_base = OTHER; note = 2'-O-methyladenosine-3'-phosphate
  modified_base 16: mod_base = OTHER; note = 2'-O-methyluridine-3'-phosphate
  modified_base 17: mod_base = OTHER; note = 2'-deoxy-2'-fluorouridine-3'-phosphate
  modified_base 18: mod_base = OTHER; note = 2'-O-methylcytidine-3'-phosphate
  modified_base 19: mod_base = OTHER; note = 2'-deoxy-2'-fluorocytidine-3'-phosphate
  modified_base 20: mod_base = OTHER; note = 2'-O-methyladenosine-3'-phosphorothioate
  modified_base 21: mod_base = OTHER; note = 2'-deoxy-2'-fluorouridine
atgtaaccaagagtattccat

SEQ ID NO: 90 - RNA, 21 nt, synthetic construct
  source 1..21: mol_type = other RNA
  modified_base 1: mod_base = OTHER; note = 2'-deoxy-2'-fluoroadenosine-3'-phosphate
  modified_base 2: mod_base = OTHER; note = 2'-O-methyluridine-3'-phosphate
  modified_base 3: mod_base = OTHER; note = 2'-deoxy-2'-fluoroguanosine-3'-phosphate
  modified_base 4: mod_base = OTHER; note = 2'-deoxy-2'-fluorouridine-3'-phosphate
  modified_base 5: mod_base = OTHER; note = 2'-deoxy-2'-fluoroadenosine-3'-phosphate
  modified_base 6: mod_base = OTHER; note = 2'-O-methyladenosine-3'-phosphate
  modified_base 7: mod_base = OTHER; note = 2'-deoxy-2'-fluorocytidine-3'-phosphate
  modified_base 8: mod_base = OTHER; note = 2'-O-methylcytidine-3'-phosphate
  modified_base 9: mod_base = OTHER; note = 2'-deoxy-2'-fluoroadenosine-3'-phosphate
  modified_base 10: mod_base = OTHER; note = 2'-O-methyladenosine-3'-phosphate
  modified_base 11: mod_base = OTHER; note = 2'-deoxy-2'-fluoroguanosine-3'-phosphate
  modified_base 12: mod_base = OTHER; note = 2'-O-methyladenosine-3'-phosphate
  modified_base 13: mod_base = OTHER; note = 2'-deoxy-2'-fluoroguanosine-3'-phosphate
  modified_base 14: mod_base = OTHER; note = 2'-O-methyluridine-3'-phosphate
  modified_base 15: mod_base = OTHER; note = 2'-O-methyladenosine-3'-phosphate
  modified_base 16: mod_base = OTHER; note = 2'-O-methyluridine-3'-phosphate
  modified_base 17: mod_base = OTHER; note = 2'-deoxy-2'-fluorouridine-3'-phosphate
  modified_base 18: mod_base = OTHER; note = 2'-O-methylcytidine-3'-phosphate
  modified_base 19: mod_base = OTHER; note = 2'-deoxy-2'-fluorocytidine-3'-phosphate
  modified_base 20: mod_base = OTHER; note = 2'-O-methyladenosine-3'-phosphorothioate
  modified_base 21: mod_base = OTHER; note = 2'-deoxy-2'-fluorouridine
atgtaaccaagagtattccat

SEQ ID NO: 91 - RNA, 21 nt, synthetic construct
  source 1..21: mol_type = other RNA
  modified_base 1: mod_base = OTHER; note = 2'-O-methyladenosine-3'-phosphate
  modified_base 2: mod_base = OTHER; note = 2'-deoxy-2'-fluorouridine-3'-phosphate
  modified_base 3: mod_base = OTHER; note = 2'-O-methylguanosine-3'-phosphate
  modified_base 4: mod_base = OTHER; note = 2'-O-methyluridine-3'-phosphate
  modified_base 5: mod_base = OTHER; note = 2'-deoxy-2'-fluoroadenosine-3'-phosphate
  modified_base 6: mod_base = OTHER; note = 2'-deoxy-2'-fluoroadenosine-3'-phosphate
  modified_base 7: mod_base = OTHER; note = 2'-O-methylcytidine-3'-phosphate
  modified_base 8: mod_base = OTHER; note = 2'-O-methylcytidine-3'-phosphate
  modified_base 9: mod_base = OTHER; note = 2'-deoxy-2'-fluoroadenosine-3'-phosphate
  modified_base 10: mod_base = OTHER; note = 2'-deoxy-2'-fluoroadenosine-3'-phosphate
  modified_base 11: mod_base = OTHER; note = 2'-O-methylguanosine-3'-phosphate
  modified_base 12: mod_base = OTHER; note = 2'-O-methyladenosine-3'-phosphate
  modified_base 13: mod_base = OTHER; note = 2'-deoxy-2'-fluoroguanosine-3'-phosphate
  modified_base 14: mod_base = OTHER; note = 2'-O-methyluridine-3'-phosphate
  modified_base 15: mod_base = OTHER; note = 2'-deoxy-2'-fluoroadenosine-3'-phosphate
  modified_base 16: mod_base = OTHER; note = 2'-O-methyluridine-3'-phosphate
  modified_base 17: mod_base = OTHER; note = 2'-deoxy-2'-fluorouridine-3'-phosphate
  modified_base 18: mod_base = OTHER; note = 2'-O-methylcytidine-3'-phosphate
  modified_base 19: mod_base = OTHER; note = 2'-deoxy-2'-fluorocytidine-3'-phosphate
  modified_base 20: mod_base = OTHER; note = 2'-O-methyladenosine-3'-phosphorothioate
  modified_base 21: mod_base = OTHER; note = 2'-deoxy-2'-fluorouridine
atgtaaccaagagtattccat

SEQ ID NO: 92 - RNA, 21 nt, synthetic construct
  source 1..21: mol_type = other RNA
  modified_base 1: mod_base = OTHER; note = 2'-deoxy-2'-fluoroadenosine-3'-phosphate
  modified_base 2: mod_base = OTHER; note = 2'-O-methyluridine-3'-phosphate
  modified_base 3: mod_base = OTHER; note = 2'-deoxy-2'-fluoroguanosine-3'-phosphate
  modified_base 4: mod_base = OTHER; note = 2'-O-methyluridine-3'-phosphate
  modified_base 5: mod_base = OTHER; note = 2'-deoxy-2'-fluoroadenosine-3'-phosphate
  modified_base 6: mod_base = OTHER; note = 2'-O-methyladenosine-3'-phosphate
  modified_base 7: mod_base = OTHER; note = 2'-deoxy-2'-fluorocytidine-3'-phosphate
  modified_base 8: mod_base = OTHER; note = 2'-O-methylcytidine-3'-phosphate
  modified_base 9: mod_base = OTHER; note = 2'-deoxy-2'-fluoroadenosine-3'-phosphate
  modified_base 10: mod_base = OTHER; note = 2'-O-methyladenosine-3'-phosphate
  modified_base 11: mod_base = OTHER; note = 2'-deoxy-2'-fluoroguanosine-3'-phosphate
  modified_base 12: mod_base = OTHER; note = 2'-O-methyladenosine-3'-phosphate
  modified_base 13: mod_base = OTHER; note = 2'-deoxy-2'-fluoroguanosine-3'-phosphate
  modified_base 14: mod_base = OTHER; note = 2'-deoxy-2'-fluorouridine-3'-phosphate
  modified_base 15: mod_base = OTHER; note = 2'-deoxy-2'-fluoroadenosine-3'-phosphate
  modified_base 16: mod_base = OTHER; note = 2'-O-methyluridine-3'-phosphate
  modified_base 17: mod_base = OTHER; note = 2'-deoxy-2'-fluorouridine-3'-phosphate
  modified_base 18: mod_base = OTHER; note = 2'-O-methylcytidine-3'-phosphate
  modified_base 19: mod_base = OTHER; note = 2'-deoxy-2'-fluorocytidine-3'-phosphate
  modified_base 20: mod_base = OTHER; note = 2'-O-methyladenosine-3'-phosphorothioate
  modified_base 21: mod_base = OTHER; note = 2'-O-methyluridine
atgtaaccaagagtattccat

SEQ ID NO: 93 - RNA, 21 nt, synthetic construct
  source 1..21: mol_type = other RNA
  modified_base 1: mod_base = OTHER; note = 2'-deoxy-2'-fluoroadenosine-3'-phosphate
  modified_base 2: mod_base = OTHER; note = 2'-O-methyluridine-3'-phosphate
  modified_base 3: mod_base = OTHER; note = 2'-deoxy-2'-fluoroguanosine-3'-phosphate
  modified_base 4: mod_base = OTHER; note = 2'-O-methyluridine-3'-phosphate
  modified_base 5: mod_base = OTHER; note = 2'-deoxy-2'-fluoroadenosine-3'-phosphate
  modified_base 6: mod_base = OTHER; note = 2'-O-methyladenosine-3'-phosphate
  modified_base 7: mod_base = OTHER; note = 2'-deoxy-2'-fluorocytidine-3'-phosphate
  modified_base 8: mod_base = OTHER; note = 2'-O-methylcytidine-3'-phosphate
  modified_base 9: mod_base = OTHER; note = 2'-deoxy-2'-fluoroadenosine-3'-phosphate
  modified_base 10: mod_base = OTHER; note = 2'-O-methyladenosine-3'-phosphate
  modified_base 11: mod_base = OTHER; note = 2'-deoxy-2'-fluoroguanosine-3'-phosphate
  modified_base 12: mod_base = OTHER; note = 2'-O-methyladenosine-3'-phosphate
  modified_base 13: mod_base = OTHER; note = 2'-deoxy-2'-fluoroguanosine-3'-phosphate
  modified_base 14: mod_base = OTHER; note = 2'-O-methyluridine-3'-phosphate
  modified_base 15: mod_base = OTHER; note = 2'-deoxy-2'-fluoroadenosine-3'-phosphate
  modified_base 16: mod_base = OTHER; note = 2'-O-methyluridine-3'-phosphate
  modified_base 17: mod_base = OTHER; note = 2'-deoxy-2'-fluorouridine-3'-phosphate
  modified_base 18: mod_base = OTHER; note = 2'-O-methylcytidine-3'-phosphate
  modified_base 19: mod_base = OTHER; note = 2'-deoxy-2'-fluorocytidine-3'-phosphate
  modified_base 20: mod_base = OTHER; note = 2'-O-methyladenosine-3'-phosphorothioate
  modified_base 21: mod_base = OTHER; note = 2'-deoxy-2'-fluorouridine
atgtaaccaagagtattccat

SEQ ID NO: 94 - RNA, 21 nt, synthetic construct
  source 1..21: mol_type = other RNA
  modified_base 1: mod_base = OTHER; note = 2'-deoxy-2'-fluoroadenosine-3'-phosphate
  modified_base 2: mod_base = OTHER; note = 2'-O-methyluridine-3'-phosphate
  modified_base 3: mod_base = OTHER; note = 2'-deoxy-2'-fluoroguanosine-3'-phosphate
  modified_base 4: mod_base = OTHER; note = 2'-O-methyluridine-3'-phosphate
  modified_base 5: mod_base = OTHER; note = 2'-deoxy-2'-fluoroadenosine-3'-phosphate
  modified_base 6: mod_base = OTHER; note = 2'-O-methyladenosine-3'-phosphate
  modified_base 7: mod_base = OTHER; note = 2'-deoxy-2'-fluorocytidine-3'-phosphate
  modified_base 8: mod_base = OTHER; note = 2'-O-methylcytidine-3'-phosphate
  modified_base 9: mod_base = OTHER; note = 2'-deoxy-2'-fluoroadenosine-3'-phosphate
  modified_base 10: mod_base = OTHER; note = 2'-O-methyladenosine-3'-phosphate
  modified_base 11: mod_base = OTHER; note = 2'-deoxy-2'-fluoroguanosine-3'-phosphate
  modified_base 12: mod_base = OTHER; note = 2'-O-methyladenosine-3'-phosphate
  modified_base 13: mod_base = OTHER; note = 2'-deoxy-2'-fluoroguanosine-3'-phosphate
  modified_base 14: mod_base = OTHER; note = 2'-deoxy-2'-fluorouridine-3'-phosphate
  modified_base 15: mod_base = OTHER; note = 2'-deoxy-2'-fluoroadenosine-3'-phosphate
  modified_base 16: mod_base = OTHER; note = 2'-O-methyluridine-3'-phosphate
  modified_base 17: mod_base = OTHER; note = 2'-deoxy-2'-fluorouridine-3'-phosphate
  modified_base 18: mod_base = OTHER; note = 2'-O-methylcytidine-3'-phosphate
  modified_base 19: mod_base = OTHER; note = 2'-deoxy-2'-fluorocytidine-3'-phosphate
  modified_base 20: mod_base = OTHER; note = 2'-O-methyladenosine-3'-phosphorothioate
  modified_base 21: mod_base = OTHER; note = 2'-deoxy-2'-fluorouridine
atgtaaccaagagtattccat

SEQ ID NO: 95 - RNA, 21 nt, synthetic construct
  source 1..21: mol_type = other RNA
  modified_base 1: mod_base = OTHER; note = 2'-deoxy-2'-fluoroadenosine-3'-phosphate
  modified_base 2: mod_base = OTHER; note = 2'-O-methyluridine-3'-phosphate
  modified_base 3: mod_base = OTHER; note = 2'-deoxy-2'-fluoroguanosine-3'-phosphate
  modified_base 4: mod_base = OTHER; note = 2'-O-methyluridine-3'-phosphate
  modified_base 5: mod_base = OTHER; note = 2'-deoxy-2'-fluoroadenosine-3'-phosphate
  modified_base 6: mod_base = OTHER; note = 2'-O-methyladenosine-3'-phosphate
  modified_base 7: mod_base = OTHER; note = 2'-deoxy-2'-fluorocytidine-3'-phosphate
  modified_base 8: mod_base = OTHER; note = 2'-O-methylcytidine-3'-phosphate
  modified_base 9: mod_base = OTHER; note = 2'-deoxy-2'-fluoroadenosine-3'-phosphate
  modified_base 10: mod_base = OTHER; note = 2'-O-methyladenosine-3'-phosphate
  modified_base 11: mod_base = OTHER; note = 2'-deoxy-2'-fluoroguanosine-3'-phosphate
  modified_base 12: mod_base = OTHER; note = 2'-O-methyladenosine-3'-phosphate
  modified_base 13: mod_base = OTHER; note = 2'-deoxy-2'-fluoroguanosine-3'-phosphate
  modified_base 14: mod_base = OTHER; note = 2'-O-methyluridine-3'-phosphate
  modified_base 15: mod_base = OTHER; note = 2'-O-methyladenosine-3'-phosphate
  modified_base 16: mod_base = OTHER; note = 2'-O-methyluridine-3'-phosphate
  modified_base 17: mod_base = OTHER; note = 2'-deoxy-2'-fluorouridine-3'-phosphate
  modified_base 18: mod_base = OTHER; note = 2'-O-methylcytidine-3'-phosphate
  modified_base 19: mod_base = OTHER; note = 2'-deoxy-2'-fluorocytidine-3'-phosphate
  modified_base 20: mod_base = OTHER; note = 2'-O-methyladenosine-3'-phosphorothioate
  modified_base 21: mod_base = OTHER; note = 2'-deoxy-2'-fluorouridine
atgtaaccaagagtattccat

SEQ ID NO: 96 - DNA, 21 bp, synthetic construct
  source 1..21: mol_type = other DNA
  modified_base 1: mod_base = OTHER; note = 2'-deoxy-2'-fluoroadenosine-3'-phosphate
  modified_base 2: mod_base = OTHER; note = 2'-O-methyluridine-3'-phosphate
  modified_base 3: mod_base = OTHER; note = 2'-O-methylguanosine-3'-phosphate
  modified_base 4: mod_base = OTHER; note = 2'-O-methyluridine-3'-phosphate
  modified_base 5: mod_base = OTHER; note = 2'-deoxy-2'-fluoroadenosine-3'-phosphate
  modified_base 6: mod_base = OTHER; note = 2'-O-methyladenosine-3'-phosphate
  modified_base 7: mod_base = OTHER; note = 2'-O-methylcytidine-3'-phosphate
  modified_base 8: mod_base = OTHER; note = 2'-O-methylcytidine-3'-phosphate
  modified_base 9: mod_base = OTHER; note = 2'-deoxy-2'-fluoroadenosine-3'-phosphate
  modified_base 10: mod_base = OTHER; note = 2'-O-methyladenosine-3'-phosphate
  modified_base 11: mod_base = OTHER; note = 2'-deoxy-2'-fluoroguanosine-3'-phosphate
  modified_base 12: mod_base = OTHER; note = 2'-O-methyladenosine-3'-phosphate
  modified_base 13: mod_base = OTHER; note = 2'-deoxy-2'-fluoroguanosine-3'-phosphate
  modified_base 15: mod_base = OTHER; note = adenosine-3'-phosphate
  modified_base 17: mod_base = OTHER; note = 2'-O-methyluridine-3'-phosphate
  modified_base 19: mod_base = OTHER; note = 2'-O-methylcytidine-3'-phosphate
  modified_base 20: mod_base = OTHER; note = 2'-deoxyadenosine-3'-phosphorothioate
  modified_base 21: mod_base = OTHER; note = 2'-O-methyluridine
  misc_feature 1..13: note = RNA
  misc_feature 15: note = RNA
  misc_feature 17: note = RNA
  misc_feature 19: note = RNA
  misc_feature 21: note = RNA
  misc_feature 14: note = DNA
  misc_feature 16: note = DNA
  misc_feature 18: note = DNA
  misc_feature 20: note = DNA
atgtaaccaagagtattccat

SEQ ID NO: 97 - RNA, 21 nt, synthetic construct
  source 1..21: mol_type = other RNA
  modified_base 1: mod_base = OTHER; note = 2'-deoxy-2'-fluoroadenosine-3'-phosphate
  modified_base 2: mod_base = OTHER; note = 2'-O-methyluridine-3'-phosphate
  modified_base 3: mod_base = OTHER; note = 2'-deoxy-2'-fluoroguanosine-3'-phosphate
  modified_base 4: mod_base = OTHER; note = 2'-O-methyluridine-3'-phosphate
  modified_base 5: mod_base = OTHER; note = 2'-deoxy-2'-fluoroadenosine-3'-phosphate
  modified_base 6: mod_base = OTHER; note = 2'-O-methyladenosine-3'-phosphate
  modified_base 7: mod_base = OTHER; note = 2'-deoxy-2'-fluorocytidine-3'-phosphate
  modified_base 8: mod_base = OTHER; note = 2'-O-methylcytidine-3'-phosphate
  modified_base 9: mod_base = OTHER; note = 2'-deoxy-2'-fluoroadenosine-3'-phosphate
  modified_base 10: mod_base = OTHER; note = 2'-O-methyladenosine-3'-phosphate
  modified_base 11: mod_base = OTHER; note = 2'-deoxy-2'-fluoroguanosine-3'-phosphate
  modified_base 12: mod_base = OTHER; note = 2'-deoxy-2'-fluoroadenosine-3'-phosphate
  modified_base 13: mod_base = OTHER; note = 2'-deoxy-2'-fluoroguanosine-3'-phosphate
  modified_base 14: mod_base = OTHER; note = 2'-O-methyluridine-3'-phosphate
  modified_base 15: mod_base = OTHER; note = 2'-deoxy-2'-fluoroadenosine-3'-phosphate
  modified_base 16: mod_base = OTHER; note = 2'-O-methyluridine-3'-phosphate
  modified_base 17: mod_base = OTHER; note = 2'-deoxy-2'-fluorouridine-3'-phosphate
  modified_base 18: mod_base = OTHER; note = 2'-O-methylcytidine-3'-phosphate
  modified_base 19: mod_base = OTHER; note = 2'-deoxy-2'-fluorocytidine-3'-phosphate
  modified_base 20: mod_base = OTHER; note = 2'-O-methyladenosine-3'-phosphorothioate
  modified_base 21: mod_base = OTHER; note = 2'-O-methyluridine
atgtaaccaagagtattccat

SEQ ID NO: 98 - RNA, 21 nt, synthetic construct
  source 1..21: mol_type = other RNA
  modified_base 1: mod_base = OTHER; note = 2'-O-methyladenosine-3'-phosphate
  modified_base 2: mod_base = OTHER; note = 2'-O-methyluridine-3'-phosphate
  modified_base 3: mod_base = OTHER; note = 2'-deoxy-2'-fluoroguanosine-3'-phosphate
  modified_base 4: mod_base = OTHER; note = 2'-O-methyluridine-3'-phosphate
  modified_base 5: mod_base = OTHER; note = 2'-deoxy-2'-fluoroadenosine-3'-phosphate
  modified_base 6: mod_base = OTHER; note = 2'-O-methyladenosine-3'-phosphate
  modified_base 7: mod_base = OTHER; note = 2'-deoxy-2'-fluorocytidine-3'-phosphate
  modified_base 8: mod_base = OTHER; note = 2'-O-methylcytidine-3'-phosphate
  modified_base 9: mod_base = OTHER; note = 2'-deoxy-2'-fluoroadenosine-3'-phosphate
  modified_base 10: mod_base = OTHER; note = 2'-O-methyladenosine-3'-phosphate
  modified_base 11: mod_base = OTHER; note = 2'-deoxy-2'-fluoroguanosine-3'-phosphate
  modified_base 12: mod_base = OTHER; note = 2'-deoxy-2'-fluoroadenosine-3'-phosphate
  modified_base 13: mod_base = OTHER; note = 2'-deoxy-2'-fluoroguanosine-3'-phosphate
  modified_base 14: mod_base = OTHER; note = 2'-O-methyluridine-3'-phosphate
  modified_base 15: mod_base = OTHER; note = 2'-deoxy-2'-fluoroadenosine-3'-phosphate
  modified_base 16: mod_base = OTHER; note = 2'-O-methyluridine-3'-phosphate
  modified_base 17: mod_base = OTHER; note = 2'-deoxy-2'-fluorouridine-3'-phosphate
  modified_base 18: mod_base = OTHER; note = 2'-O-methylcytidine-3'-phosphate
  modified_base 19: mod_base = OTHER; note = 2'-deoxy-2'-fluorocytidine-3'-phosphate
  modified_base 20: mod_base = OTHER; note = 2'-O-methyladenosine-3'-phosphorothioate
  modified_base 21: mod_base = OTHER; note = 2'-deoxy-2'-fluorouridine
atgtaaccaagagtattccat

SEQ ID NO: 99 - RNA, 21 nt, synthetic construct
  source 1..21: mol_type = other RNA
  modified_base 1: mod_base = OTHER; note = 2'-deoxy-2'-fluoroadenosine-3'-phosphate
  modified_base 2: mod_base = OTHER; note = 2'-O-methyluridine-3'-phosphate
  modified_base 3: mod_base = OTHER; note = 2'-deoxy-2'-fluoroguanosine-3'-phosphate
  modified_base 4: mod_base = OTHER; note = 2'-O-methyluridine-3'-phosphate
  modified_base 5: mod_base = OTHER; note = 2'-deoxy-2'-fluoroadenosine-3'-phosphate
  modified_base 6: mod_base = OTHER; note = 2'-O-methyladenosine-3'-phosphate
  modified_base 7: mod_base = OTHER; note = 2'-deoxy-2'-fluorocytidine-3'-phosphate
  modified_base 8: mod_base = OTHER; note = 2'-O-methylcytidine-3'-phosphate
  modified_base 9: mod_base = OTHER; note = 2'-deoxy-2'-fluoroadenosine-3'-phosphate
  modified_base 10: mod_base = OTHER; note = 2'-O-methyladenosine-3'-phosphate
  modified_base 11: mod_base = OTHER; note = 2'-deoxy-2'-fluoroguanosine-3'-phosphate
  modified_base 12: mod_base = OTHER; note = 2'-O-methyladenosine-3'-phosphate
  modified_base 13: mod_base = OTHER; note = 2'-deoxy-2'-fluoroguanosine-3'-phosphate
  modified_base 14: mod_base = OTHER; note = 2'-deoxy-2'-fluorouridine-3'-phosphate
  modified_base 15: mod_base = OTHER; note = 2'-deoxy-2'-fluoroadenosine-3'-phosphate
  modified_base 16: mod_base = OTHER; note = 2'-O-methyluridine-3'-phosphate
  modified_base 17: mod_base = OTHER; note = 2'-deoxy-2'-fluorouridine-3'-phosphate
  modified_base 18: mod_base = OTHER; note = 2'-O-methylcytidine-3'-phosphate
  modified_base 19: mod_base = OTHER; note = 2'-O-methylcytidine-3'-phosphate
  modified_base 20: mod_base = OTHER; note = 2'-O-methyladenosine-3'-phosphorothioate
  modified_base 21: mod_base = OTHER; note = 2'-deoxy-2'-fluorouridine
atgtaaccaagagtattccat

SEQ ID NO: 100 - RNA, 21 nt, synthetic construct
  source 1..21: mol_type = other RNA
  modified_base 1: mod_base = OTHER; note = 2'-deoxy-2'-fluoroadenosine-3'-phosphate
  modified_base 2: mod_base = OTHER; note = 2'-O-methyluridine-3'-phosphate
  modified_base 3: mod_base = OTHER; note = 2'-deoxy-2'-fluoroguanosine-3'-phosphate
  modified_base 4: mod_base = OTHER; note = 2'-O-methyluridine-3'-phosphate
  modified_base 5: mod_base = OTHER; note = 2'-deoxy-2'-fluoroadenosine-3'-phosphate
  modified_base 6: mod_base = OTHER; note = 2'-O-methyladenosine-3'-phosphate
  modified_base 7: mod_base = OTHER; note = 2'-deoxy-2'-fluorocytidine-3'-phosphate
  modified_base 8: mod_base = OTHER; note = 2'-O-methylcytidine-3'-phosphate
  modified_base 9: mod_base = OTHER; note = 2'-deoxy-2'-fluoroadenosine-3'-phosphate
  modified_base 10: mod_base = OTHER; note = 2'-O-methyladenosine-3'-phosphate
  modified_base 11: mod_base = OTHER; note = 2'-deoxy-2'-fluoroguanosine-3'-phosphate
  modified_base 12: mod_base = OTHER; note = 2'-deoxy-2'-fluoroadenosine-3'-phosphate
  modified_base 13: mod_base = OTHER; note = 2'-deoxy-2'-fluoroguanosine-3'-phosphate
  modified_base 14: mod_base = OTHER; note = 2'-O-methyluridine-3'-phosphate
  modified_base 15: mod_base = OTHER; note = 2'-deoxy-2'-fluoroadenosine-3'-phosphate
  modified_base 16: mod_base = OTHER; note = 2'-O-methyluridine-3'-phosphate
  modified_base 17: mod_base = OTHER; note = 2'-deoxy-2'-fluorouridine-3'-phosphate
  modified_base 18: mod_base = OTHER; note = 2'-O-methylcytidine-3'-phosphate
  modified_base 19: mod_base = OTHER; note = 2'-deoxy-2'-fluorocytidine-3'-phosphate
  modified_base 20: mod_base = OTHER; note = 2'-O-methyladenosine-3'-phosphorothioate
  modified_base 21: mod_base = OTHER; note = 2'-deoxy-2'-fluorouridine
atgtaaccaagagtattccat

SEQ ID NO: 101 - RNA, 21 nt, synthetic construct
  source 1..21: mol_type = other RNA
  modified_base 1: mod_base = OTHER; note = 2'-deoxy-2'-fluoroadenosine-3'-phosphate
  modified_base 2: mod_base = OTHER; note = 2'-O-methyluridine-3'-phosphate
  modified_base 3: mod_base = OTHER; note = 2'-deoxy-2'-fluoroguanosine-3'-phosphate
  modified_base 4: mod_base = OTHER; note = 2'-O-methyluridine-3'-phosphate
  modified_base 5: mod_base = OTHER; note = 2'-deoxy-2'-fluoroadenosine-3'-phosphate
  modified_base 6: mod_base = OTHER; note = 2'-O-methyladenosine-3'-phosphate
  modified_base 7: mod_base = OTHER; note = 2'-deoxy-2'-fluorocytidine-3'-phosphate
  modified_base 8: mod_base = OTHER; note = 2'-O-methylcytidine-3'-phosphate
  modified_base 9: mod_base = OTHER; note = 2'-deoxy-2'-fluoroadenosine-3'-phosphate
  modified_base 10: mod_base = OTHER; note = 2'-O-methyladenosine-3'-phosphate
  modified_base 11: mod_base = OTHER; note = 2'-deoxy-2'-fluoroguanosine-3'-phosphate
  modified_base 12: mod_base = OTHER; note = 2'-O-methyladenosine-3'-phosphate
  modified_base 13: mod_base = OTHER; note = 2'-deoxy-2'-fluoroguanosine-3'-phosphate
  modified_base 14: mod_base = OTHER; note = 2'-deoxy-2'-fluorouridine-3'-phosphate
  modified_base 15: mod_base = OTHER; note = 2'-deoxy-2'-fluoroadenosine-3'-phosphate
  modified_base 16: mod_base = OTHER; note = 2'-O-methyluridine-3'-phosphate
  modified_base 17: mod_base = OTHER; note = 2'-O-methyluridine-3'-phosphate
  modified_base 18: mod_base = OTHER; note = 2'-O-methylcytidine-3'-phosphate
  modified_base 19: mod_base = OTHER; note = 2'-deoxy-2'-fluorocytidine-3'-phosphate
  modified_base 20: mod_base = OTHER; note = 2'-O-methyladenosine-3'-phosphorothioate
  modified_base 21: mod_base = OTHER; note = 2'-deoxy-2'-fluorouridine
atgtaaccaagagtattccat

SEQ ID NO: 102 - RNA, 21 nt, synthetic construct
  source 1..21: mol_type = other RNA
  modified_base 1: mod_base = OTHER; note = 2'-deoxy-2'-fluoroadenosine-3'-phosphate
  modified_base 2: mod_base = OTHER; note = 2'-O-methyluridine-3'-phosphate
  modified_base 3: mod_base = OTHER; note = 2'-deoxy-2'-fluoroguanosine-3'-phosphate
  modified_base 4: mod_base = OTHER; note = 2'-deoxy-2'-fluorouridine-3'-phosphate
  modified_base 5: mod_base = OTHER; note = 2'-deoxy-2'-fluoroadenosine-3'-phosphate
  modified_base 6: mod_base = OTHER; note = 2'-O-methyladenosine-3'-phosphate
  modified_base 7: mod_base = OTHER; note = 2'-deoxy-2'-fluorocytidine-3'-phosphate
  modified_base 8: mod_base = OTHER; note = 2'-O-methylcytidine-3'-phosphate
  modified_base 9: mod_base = OTHER; note = 2'-deoxy-2'-fluoroadenosine-3'-phosphate
  modified_base 10: mod_base = OTHER; note = 2'-O-methyladenosine-3'-phosphate
  modified_base 11: mod_base = OTHER; note = 2'-deoxy-2'-fluoroguanosine-3'-phosphate
  modified_base 12: mod_base = OTHER; note = 2'-O-methyladenosine-3'-phosphate
  modified_base 13: mod_base = OTHER; note = 2'-deoxy-2'-fluoroguanosine-3'-phosphate
  modified_base 14: mod_base = OTHER; note = 2'-O-methyluridine-3'-phosphate
  modified_base 15: mod_base = OTHER; note = 2'-deoxy-2'-fluoroadenosine-3'-phosphate
  modified_base 16: mod_base = OTHER; note = 2'-O-methyluridine-3'-phosphate
  modified_base 17: mod_base = OTHER; note = 2'-O-methyluridine-3'-phosphate
  modified_base 18: mod_base = OTHER; note = 2'-O-methylcytidine-3'-phosphate
  modified_base 19: mod_base = OTHER; note = 2'-deoxy-2'-fluorocytidine-3'-phosphate
  modified_base 20: mod_base = OTHER; note = 2'-O-methyladenosine-3'-phosphorothioate
  modified_base 21: mod_base = OTHER; note = 2'-deoxy-2'-fluorouridine
atgtaaccaagagtattccat

SEQ ID NO: 103 - RNA, 21 nt, synthetic construct
  source 1..21: mol_type = other RNA
  modified_base 1: mod_base = OTHER; note = 2'-deoxy-2'-fluoroadenosine-3'-phosphate
  modified_base 2: mod_base = OTHER; note = 2'-O-methyluridine-3'-phosphate
  modified_base 3: mod_base = OTHER; note = 2'-deoxy-2'-fluoroguanosine-3'-phosphate
  modified_base 4: mod_base = OTHER; note = 2'-O-methyluridine-3'-phosphate
  modified_base 5: mod_base = OTHER; note = 2'-deoxy-2'-fluoroadenosine-3'-phosphate
  modified_base 6: mod_base = OTHER; note = 2'-O-methyladenosine-3'-phosphate
  modified_base 7: mod_base = OTHER; note = 2'-deoxy-2'-fluorocytidine-3'-phosphate
  modified_base 8: mod_base = OTHER; note = 2'-O-methylcytidine-3'-phosphate
  modified_base 9: mod_base = OTHER; note = 2'-deoxy-2'-fluoroadenosine-3'-phosphate
  modified_base 10: mod_base = OTHER; note = 2'-O-methyladenosine-3'-phosphate
  modified_base 11: mod_base = OTHER; note = 2'-deoxy-2'-fluoroguanosine-3'-phosphate
  modified_base 12: mod_base = OTHER; note = 2'-O-methyladenosine-3'-phosphate
  modified_base 13: mod_base = OTHER; note = 2'-deoxy-2'-fluoroguanosine-3'-phosphate
  modified_base 14: mod_base = OTHER; note = 2'-O-methyluridine-3'-phosphate
  modified_base 15: mod_base = OTHER; note = 2'-deoxy-2'-fluoroadenosine-3'-phosphate
  modified_base 16: mod_base = OTHER; note = 2'-deoxy-2'-fluorouridine-3'-phosphate
  modified_base 17: mod_base = OTHER; note = 2'-deoxy-2'-fluorouridine-3'-phosphate
  modified_base 18: mod_base = OTHER; note = 2'-O-methylcytidine-3'-phosphate
  modified_base 19: mod_base = OTHER; note = 2'-O-methylcytidine-3'-phosphate
  modified_base 20: mod_base = OTHER; note = 2'-O-methyladenosine-3'-phosphorothioate
  modified_base 21: mod_base = OTHER; note = 2'-deoxy-2'-fluorouridine
atgtaaccaagagtattccat

SEQ ID NO: 104 - RNA, 21 nt, synthetic construct
  source 1..21: mol_type = other RNA
  modified_base 1: mod_base = OTHER; note = 2'-deoxy-2'-fluoroadenosine-3'-phosphate
  modified_base 2: mod_base = OTHER; note = 2'-O-methyluridine-3'-phosphate
  modified_base 3: mod_base = OTHER; note = 2'-deoxy-2'-fluoroguanosine-3'-phosphate
  modified_base 4: mod_base = OTHER; note = 2'-O-methyluridine-3'-phosphate
  modified_base 5: mod_base = OTHER; note = 2'-deoxy-2'-fluoroadenosine-3'-phosphate
  modified_base 6: mod_base = OTHER; note = 2'-O-methyladenosine-3'-phosphate
  modified_base 7: mod_base = OTHER; note = 2'-deoxy-2'-fluorocytidine-3'-phosphate
  modified_base 8: mod_base = OTHER; note = 2'-O-methylcytidine-3'-phosphate
  modified_base 9: mod_base = OTHER; note = 2'-deoxy-2'-fluoroadenosine-3'-phosphate
  modified_base 10: mod_base = OTHER; note = 2'-O-methyladenosine-3'-phosphate
  modified_base 11: mod_base = OTHER; note = 2'-deoxy-2'-fluoroguanosine-3'-phosphate
  modified_base 12: mod_base = OTHER; note = 2'-O-methyladenosine-3'-phosphate
  modified_base 13: mod_base = OTHER; note = 2'-deoxy-2'-fluoroguanosine-3'-phosphate
  modified_base 14: mod_base = OTHER; note = 2'-O-methyluridine-3'-phosphate
  modified_base 15: mod_base = OTHER; note = 2'-deoxy-2'-fluoroadenosine-3'-phosphate
  modified_base 16: mod_base = OTHER; note = 2'-O-methyluridine-3'-phosphate
  modified_base 17: mod_base = OTHER; note = 2'-deoxy-2'-fluorouridine-3'-phosphate
  modified_base 18: mod_base = OTHER; note = 2'-O-methylcytidine-3'-phosphate
  modified_base 19: mod_base = OTHER; note = 2'-deoxy-2'-fluorocytidine-3'-phosphate
  modified_base 20: mod_base = OTHER; note = 2'-O-methyladenosine-3'-phosphorothioate
  modified_base 21: mod_base = OTHER; note = 2'-deoxy-2'-fluorouridine
atgtaaccaagagtattccat

SEQ ID NO: 105 - RNA, 21 nt, synthetic construct
  source 1..21: mol_type = other RNA
  modified_base 1: mod_base = OTHER; note = 2'-deoxy-2'-fluoroadenosine-3'-phosphate
  modified_base 2: mod_base = OTHER; note = 2'-O-methyluridine-3'-phosphate
  modified_base 3: mod_base = OTHER; note = 2'-O-methylguanosine-3'-phosphate
  modified_base 4: mod_base = OTHER; note = 2'-O-methyluridine-3'-phosphate
  modified_base 5: mod_base = OTHER; note = 2'-deoxy-2'-fluoroadenosine-3'-phosphate
  modified_base 6: mod_base = OTHER; note = 2'-O-methyladenosine-3'-phosphate
  modified_base 7: mod_base = OTHER; note = 2'-O-methylcytidine-3'-phosphate
  modified_base 8: mod_base = OTHER; note = 2'-O-methylcytidine-3'-phosphate
  modified_base 9: mod_base = OTHER; note = 2'-deoxy-2'-fluoroadenosine-3'-phosphate
  modified_base 10: mod_base = OTHER; note = 2'-O-methyladenosine-3'-phosphate
  modified_base 11: mod_base = OTHER; note = 2'-deoxy-2'-fluoroguanosine-3'-phosphate
  modified_base 12: mod_base = OTHER; note = 2'-O-methyladenosine-3'-phosphate
  modified_base 13: mod_base = OTHER; note = 2'-deoxy-2'-fluoroguanosine-3'-phosphate
  modified_base 14: mod_base = OTHER; note = 2'-O-methyluridine-3'-phosphate
  modified_base 15: mod_base = OTHER; note = 2'-deoxy-2'-fluoroadenosine-3'-phosphate
  modified_base 16: mod_base = OTHER; note = 2'-O-methyluridine-3'-phosphate
  modified_base 17: mod_base = OTHER; note = 2'-deoxy-2'-fluorouridine-3'-phosphate
  modified_base 18: mod_base = OTHER; note = 2'-O-methylcytidine-3'-phosphate
  modified_base 19: mod_base = OTHER; note = 2'-deoxy-2'-fluorocytidine-3'-phosphate
  modified_base 20: mod_base = OTHER; note = 2'-O-methyladenosine-3'-phosphorothioate
  modified_base 21: mod_base = OTHER; note = 2'-deoxy-2'-fluorouridine
atgtaaccaagagtattccat

SEQ ID NO: 106 - RNA, 21 nt, synthetic construct
  source 1..21: mol_type = other RNA
  modified_base 1: mod_base = OTHER; note = 2'-deoxy-2'-fluoroadenosine-3'-phosphate
  modified_base 2: mod_base = OTHER; note = 2'-O-methyluridine-3'-phosphate
  modified_base 3: mod_base = OTHER; note = 2'-deoxy-2'-fluoroguanosine-3'-phosphate
  modified_base 4: mod_base = OTHER; note = 2'-O-methyluridine-3'-phosphate
  modified_base 5: mod_base = OTHER; note = 2'-deoxy-2'-fluoroadenosine-3'-phosphate
  modified_base 6: mod_base = OTHER; note = 2'-O-methyladenosine-3'-phosphate
  modified_base 7: mod_base = OTHER; note = 2'-deoxy-2'-fluorocytidine-3'-phosphate
  modified_base 8: mod_base = OTHER; note = 2'-O-methylcytidine-3'-phosphate
  modified_base 9: mod_base = OTHER; note = 2'-deoxy-2'-fluoroadenosine-3'-phosphate
  modified_base 10: mod_base = OTHER; note = 2'-O-methyladenosine-3'-phosphate
  modified_base 11: mod_base = OTHER; note = 2'-deoxy-2'-fluoroguanosine-3'-phosphate
  modified_base 12: mod_base = OTHER; note = 2'-deoxy-2'-fluoroadenosine-3'-phosphate
  modified_base 13: mod_base = OTHER; note = 2'-deoxy-2'-fluoroguanosine-3'-phosphate
  modified_base 14: mod_base = OTHER; note = 2'-O-methyluridine-3'-phosphate
  modified_base 15: mod_base = OTHER; note = 2'-deoxy-2'-fluoroadenosine-3'-phosphate
  modified_base 16: mod_base = OTHER; note = 2'-O-methyluridine-3'-phosphate
  modified_base 17: mod_base = OTHER; note = 2'-deoxy-2'-fluorouridine-3'-phosphate
  modified_base 18: mod_base = OTHER; note = 2'-O-methylcytidine-3'-phosphate
  modified_base 19: mod_base = OTHER; note = 2'-O-methylcytidine-3'-phosphate
  modified_base 20: mod_base = OTHER; note = 2'-O-methyladenosine-3'-phosphorothioate
  modified_base 21: mod_base = OTHER; note = 2'-deoxy-2'-fluorouridine
atgtaaccaagagtattccat

SEQ ID NO: 107 - RNA, 21 nt, synthetic construct
  source 1..21: mol_type = other RNA
  modified_base 1: mod_base = OTHER; note = 2'-deoxy-2'-fluoroadenosine-3'-phosphate
  modified_base 2: mod_base = OTHER; note = 2'-O-methyluridine-3'-phosphate
  modified_base 3: mod_base = OTHER; note = 2'-deoxy-2'-fluoroguanosine-3'-phosphate
  modified_base 4: mod_base = OTHER; note = 2'-O-methyluridine-3'-phosphate
  modified_base 5: mod_base = OTHER; note = 2'-deoxy-2'-fluoroadenosine-3'-phosphate
  modified_base 6: mod_base = OTHER; note = 2'-O-methyladenosine-3'-phosphate
  modified_base 7: mod_base = OTHER; note = 2'-O-methylcytidine-3'-phosphate
  modified_base 8: mod_base = OTHER; note = 2'-O-methylcytidine-3'-phosphate
  modified_base 9: mod_base = OTHER; note = 2'-O-methyladenosine-3'-phosphate
  modified_base 10: mod_base = OTHER; note = 2'-O-methyladenosine-3'-phosphate
  modified_base 11: mod_base = OTHER; note = 2'-O-methylguanosine-3'-phosphate
  modified_base 12: mod_base = OTHER; note = 2'-O-methyladenosine-3'-phosphate
  modified_base 13: mod_base = OTHER; note = 2'-O-methylguanosine-3'-phosphate
  modified_base 14: mod_base = OTHER; note = 2'-O-methyluridine-3'-phosphate
  modified_base 15: mod_base = OTHER; note = 2'-deoxy-2'-fluoroadenosine-3'-phosphate
  modified_base 16: mod_base = OTHER; note = 2'-O-methyluridine-3'-phosphate
  modified_base 17: mod_base = OTHER; note = 2'-deoxy-2'-fluorouridine-3'-phosphate
  modified_base 18: mod_base = OTHER; note = 2'-O-methylcytidine-3'-phosphate
  modified_base 19: mod_base = OTHER; note = 2'-deoxy-2'-fluorocytidine-3'-phosphate
  modified_base 20: mod_base = OTHER; note = 2'-O-methyladenosine-3'-phosphorothioate
  modified_base 21: mod_base = OTHER; note = 2'-deoxy-2'-fluorouridine
atgtaaccaagagtattccat

SEQ ID NO: 108 - RNA, 21 nt, synthetic construct
  source 1..21: mol_type = other RNA
  modified_base 1: mod_base = OTHER; note = 2'-deoxy-2'-fluoroadenosine-3'-phosphate
  modified_base 2: mod_base = OTHER; note = 2'-O-methyluridine-3'-phosphate
  modified_base 3: mod_base = OTHER; note = 2'-deoxy-2'-fluoroguanosine-3'-phosphate
  modified_base 4: mod_base = OTHER; note = 2'-O-methyluridine-3'-phosphate
  modified_base 5: mod_base = OTHER; note = 2'-O-methyladenosine-3'-phosphate
  modified_base 6: mod_base = OTHER; note = 2'-O-methyladenosine-3'-phosphate
  modified_base 7: mod_base = OTHER; note = 2'-deoxy-2'-fluorocytidine-3'-phosphate
  modified_base 8: mod_base = OTHER; note = 2'-deoxy-2'-fluorocytidine-3'-phosphate
  modified_base 9: mod_base = OTHER; note = 2'-deoxy-2'-fluoroadenosine-3'-phosphate
  modified_base 10: mod_base = OTHER; note = 2'-O-methyladenosine-3'-phosphate
  modified_base 11: mod_base = OTHER; note = 2'-deoxy-2'-fluoroguanosine-3'-phosphate
  modified_base 12: mod_base = OTHER; note = 2'-O-methyladenosine-3'-phosphate
  modified_base 13: mod_base = OTHER; note = 2'-deoxy-2'-fluoroguanosine-3'-phosphate
  modified_base 14: mod_base = OTHER; note = 2'-O-methyluridine-3'-phosphate
  modified_base 15: mod_base = OTHER; note = 2'-deoxy-2'-fluoroadenosine-3'-phosphate
  modified_base 16: mod_base = OTHER; note = 2'-O-methyluridine-3'-phosphate
  modified_base 17: mod_base = OTHER; note = 2'-deoxy-2'-fluorouridine-3'-phosphate
  modified_base 18: mod_base = OTHER; note = 2'-O-methylcytidine-3'-phosphate
  modified_base 19: mod_base = OTHER; note = 2'-deoxy-2'-fluorocytidine-3'-phosphate
  modified_base 20: mod_base = OTHER; note = 2'-O-methyladenosine-3'-phosphorothioate
  modified_base 21: mod_base = OTHER; note = 2'-deoxy-2'-fluorouridine
atgtaaccaagagtattccat

SEQ ID NO: 109 - RNA, 21 nt, synthetic construct
  source 1..21: mol_type = other RNA
  modified_base 1: mod_base = OTHER; note = 2'-deoxy-2'-fluoroadenosine-3'-phosphate
  modified_base 2: mod_base = OTHER; note = 2'-O-methyluridine-3'-phosphate
  modified_base 3: mod_base = OTHER; note = 2'-deoxy-2'-fluoroguanosine-3'-phosphate
  modified_base 4: mod_base = OTHER; note = 2'-O-methyluridine-3'-phosphate
  modified_base 5: mod_base = OTHER; note = 2'-deoxy-2'-fluoroadenosine-3'-phosphate
  modified_base 6: mod_base = OTHER; note = 2'-O-methyladenosine-3'-phosphate
  modified_base 7: mod_base = OTHER; note = 2'-O-methylcytidine-3'-phosphate
  modified_base 8: mod_base = OTHER; note = 2'-O-methylcytidine-3'-phosphate
  modified_base 9: mod_base = OTHER; note = 2'-deoxy-2'-fluoroadenosine-3'-phosphate
  modified_base 10: mod_base = OTHER; note = 2'-O-methyladenosine-3'-phosphate
  modified_base 11: mod_base = OTHER; note = 2'-deoxy-2'-fluoroguanosine-3'-phosphate
  modified_base 12: mod_base = OTHER; note = 2'-O-methyladenosine-3'-phosphate
  modified_base 13: mod_base = OTHER; note = 2'-deoxy-2'-fluoroguanosine-3'-phosphate
  modified_base 14: mod_base = OTHER; note = 2'-deoxy-2'-fluorouridine-3'-phosphate
  modified_base 15: mod_base = OTHER; note = 2'-deoxy-2'-fluoroadenosine-3'-phosphate
  modified_base 16: mod_base = OTHER; note = 2'-O-methyluridine-3'-phosphate
  modified_base 17: mod_base = OTHER; note = 2'-deoxy-2'-fluorouridine-3'-phosphate
  modified_base 18: mod_base = OTHER; note = 2'-O-methylcytidine-3'-phosphate
  modified_base 19: mod_base = OTHER; note = 2'-deoxy-2'-fluorocytidine-3'-phosphate
  modified_base 20: mod_base = OTHER; note = 2'-O-methyladenosine-3'-phosphorothioate
  modified_base 21: mod_base = OTHER; note = 2'-deoxy-2'-fluorouridine
atgtaaccaagagtattccat

SEQ ID NO: 110 - RNA, 21 nt, synthetic construct
  source 1..21: mol_type = other RNA
  modified_base 1: mod_base = OTHER; note = 2'-deoxy-2'-fluoroadenosine-3'-phosphate
  modified_base 2: mod_base = OTHER; note = 2'-O-methyluridine-3'-phosphate
  modified_base 3: mod_base = OTHER; note = 2'-deoxy-2'-fluoroguanosine-3'-phosphate
  modified_base 4: mod_base = OTHER; note = 2'-O-methyluridine-3'-phosphate
  modified_base 5: mod_base = OTHER; note = 2'-deoxy-2'-fluoroadenosine-3'-phosphate
  modified_base 6: mod_base = OTHER; note = 2'-O-methyladenosine-3'-phosphate
  modified_base 7: mod_base = OTHER; note = 2'-deoxy-2'-fluorocytidine-3'-phosphate
  modified_base 8: mod_base = OTHER; note = 2'-O-methylcytidine-3'-phosphate
  modified_base 9: mod_base = OTHER; note = 2'-deoxy-2'-fluoroadenosine-3'-phosphate
  modified_base 10: mod_base = OTHER; note = 2'-O-methyladenosine-3'-phosphate
  modified_base 11: mod_base = OTHER; note = 2'-deoxy-2'-fluoroguanosine-3'-phosphate
  modified_base 12: mod_base = OTHER; note = 2'-O-methyladenosine-3'-phosphate
  modified_base 13: mod_base = OTHER; note = 2'-deoxy-2'-fluoroguanosine-3'-phosphate
  modified_base 14: mod_base = OTHER; note = 2'-O-methyluridine-3'-phosphate
  modified_base 15: mod_base = OTHER; note = 2'-deoxy-2'-fluoroadenosine-3'-phosphate
  modified_base 16: mod_base = OTHER; note = 2'-O-methyluridine-3'-phosphate
  modified_base 17: mod_base = OTHER; note = 2'-O-methyluridine-3'-phosphate
  modified_base 18: mod_base = OTHER; note = 2'-O-methylcytidine-3'-phosphate
  modified_base 19: mod_base = OTHER; note = 2'-deoxy-2'-fluorocytidine-3'-phosphate
  modified_base 20: mod_base = OTHER; note = 2'-O-methyladenosine-3'-phosphorothioate
  modified_base 21: mod_base = OTHER; note = 2'-deoxy-2'-fluorouridine
atgtaaccaagagtattccat

SEQ ID NO: 111 - RNA, 21 nt, synthetic construct
  source 1..21: mol_type = other RNA
  modified_base 1: mod_base = OTHER; note = 2'-deoxy-2'-fluoroadenosine-3'-phosphate
  modified_base 2: mod_base = OTHER; note = 2'-O-methyluridine-3'-phosphate
  modified_base 3: mod_base = OTHER; note = 2'-deoxy-2'-fluoroguanosine-3'-phosphate
  modified_base 4: mod_base = OTHER; note = 2'-O-methyluridine-3'-phosphate
  modified_base 5: mod_base = OTHER; note = 2'-O-methyladenosine-3'-phosphate
  modified_base 6: mod_base = OTHER; note = 2'-O-methyladenosine-3'-phosphate
  modified_base 7: mod_base = OTHER; note = 2'-deoxy-2'-fluorocytidine-3'-phosphate
  modified_base 8: mod_base = OTHER; note = 2'-O-methylcytidine-3'-phosphate
  modified_base 9: mod_base = OTHER; note = 2'-deoxy-2'-fluoroadenosine-3'-phosphate
  modified_base 10: mod_base = OTHER; note = 2'-O-methyladenosine-3'-phosphate
  modified_base 11: mod_base = OTHER; note = 2'-deoxy-2'-fluoroguanosine-3'-phosphate
  modified_base 12: mod_base = OTHER; note = 2'-deoxy-2'-fluoroadenosine-3'-phosphate
  modified_base 13: mod_base = OTHER; note = 2'-deoxy-2'-fluoroguanosine-3'-phosphate
  modified_base 14: mod_base = OTHER; note = 2'-O-methyluridine-3'-phosphate
  modified_base 15: mod_base = OTHER; note = 2'-deoxy-2'-fluoroadenosine-3'-phosphate
  modified_base 16: mod_base = OTHER; note = 2'-O-methyluridine-3'-phosphate
  modified_base 17: mod_base = OTHER; note = 2'-deoxy-2'-fluorouridine-3'-phosphate
  modified_base 18: mod_base = OTHER; note = 2'-O-methylcytidine-3'-phosphate
  modified_base 19: mod_base = OTHER; note = 2'-deoxy-2'-fluorocytidine-3'-phosphate
  modified_base 20: mod_base = OTHER; note = 2'-O-methyladenosine-3'-phosphorothioate
  modified_base 21: mod_base = OTHER; note = 2'-deoxy-2'-fluorouridine
atgtaaccaagagtattccat

SEQ ID NO: 112 - RNA, 21 nt, synthetic construct
  source 1..21: mol_type = other RNA
  modified_base 1: mod_base = OTHER; note = 2'-deoxy-2'-fluoroadenosine-3'-phosphate
  modified_base 2: mod_base = OTHER; note = 2'-O-methyluridine-3'-phosphate
  modified_base 3: mod_base = OTHER; note = 2'-deoxy-2'-fluoroguanosine-3'-phosphate
  modified_base 4: mod_base = OTHER; note = 2'-O-methyluridine-3'-phosphate
  modified_base 5: mod_base = OTHER; note = 2'-deoxy-2'-fluoroadenosine-3'-phosphate
  modified_base 6: mod_base = OTHER; note = 2'-O-methyladenosine-3'-phosphate
  modified_base 7: mod_base = OTHER; note = 2'-O-methylcytidine-3'-phosphate
  modified_base 8: mod_base = OTHER; note = 2'-O-methylcytidine-3'-phosphate
  modified_base 9: mod_base = OTHER; note = 2'-deoxy-2'-fluoroadenosine-3'-phosphate
  modified_base 10: mod_base = OTHER; note = 2'-O-methyladenosine-3'-phosphate
  modified_base 11: mod_base = OTHER; note = 2'-deoxy-2'-fluoroguanosine-3'-phosphate
  modified_base 12: mod_base = OTHER; note = 2'-deoxy-2'-fluoroadenosine-3'-phosphate
  modified_base 13: mod_base = OTHER; note = 2'-deoxy-2'-fluoroguanosine-3'-phosphate
  modified_base 14: mod_base = OTHER; note = 2'-O-methyluridine-3'-phosphate
  modified_base 15: mod_base = OTHER; note = 2'-deoxy-2'-fluoroadenosine-3'-phosphate
  modified_base 16: mod_base = OTHER; note = 2'-O-methyluridine-3'-phosphate
  modified_base 17: mod_base = OTHER; note = 2'-deoxy-2'-fluorouridine-3'-phosphate
  modified_base 18: mod_base = OTHER; note = 2'-O-methylcytidine-3'-phosphate
  modified_base 19: mod_base = OTHER; note = 2'-deoxy-2'-fluorocytidine-3'-phosphate
  modified_base 20: mod_base = OTHER; note = 2'-O-methyladenosine-3'-phosphorothioate
  modified_base 21: mod_base = OTHER; note = 2'-deoxy-2'-fluorouridine
atgtaaccaagagtattccat

SEQ ID NO: 113 - DNA, 21 bp, synthetic construct
  source 1..21: mol_type = other DNA
  modified_base 1: mod_base = OTHER; note = 2'-deoxy-2'-fluoroadenosine-3'-phosphate
  modified_base 2: mod_base = OTHER; note = 2'-O-methyluridine-3'-phosphate
  modified_base 3: mod_base = OTHER; note = 2'-O-methylguanosine-3'-phosphate
  modified_base 4: mod_base = OTHER; note = 2'-O-methyluridine-3'-phosphate
  modified_base 5: mod_base = OTHER; note = 2'-deoxy-2'-fluoroadenosine-3'-phosphate
  modified_base 6: mod_base = OTHER; note = 2'-O-methyladenosine-3'-phosphate
  modified_base 7: mod_base = OTHER; note = 2'-O-methylcytidine-3'-phosphate
  modified_base 8: mod_base = OTHER; note = 2'-O-methylcytidine-3'-phosphate
  modified_base 9: mod_base = OTHER; note = 2'-deoxy-2'-fluoroadenosine-3'-phosphate
  modified_base 10: mod_base = OTHER; note = 2'-O-methyladenosine-3'-phosphate
  modified_base 11: mod_base = OTHER; note = 2'-deoxy-2'-fluoroguanosine-3'-phosphate
  modified_base 12: mod_base = OTHER; note = 2'-O-methyladenosine-3'-phosphate
  modified_base 13: mod_base = OTHER; note = 2'-deoxy-2'-fluoroguanosine-3'-phosphate
  modified_base 15: mod_base = OTHER; note = 2'-O-methyladenosine-3'-phosphate
  modified_base 17: mod_base = OTHER; note = 2'-O-methyluridine-3'-phosphate
  modified_base 19: mod_base = OTHER; note = 2'-O-methylcytidine-3'-phosphate
  modified_base 20: mod_base = OTHER; note = 2'-deoxyadenosine-3'-phosphorothioate
  modified_base 21: mod_base = OTHER; note = 2'-O-methyluridine
  misc_feature 1..13: note = RNA
  misc_feature 15: note = RNA
  misc_feature 17: note = RNA
  misc_feature 19: note = RNA
  misc_feature 21: note = RNA
  misc_feature 14: note = DNA
  misc_feature 16: note = DNA
  misc_feature 18: note = DNA
  misc_feature 20: note = DNA
atgtaaccaagagtattccat

SEQ ID NO: 114 - RNA, 21 nt, synthetic construct
  source 1..21: mol_type = other RNA
  modified_base 1: mod_base = OTHER; note = 2'-deoxy-2'-fluoroadenosine-3'-phosphate
  modified_base 2: mod_base = OTHER; note = 2'-O-methyluridine-3'-phosphate
  modified_base 3: mod_base = OTHER; note = 2'-deoxy-2'-fluoroguanosine-3'-phosphate
  modified_base 4: mod_base = OTHER; note = 2'-deoxy-2'-fluorouridine-3'-phosphate
  modified_base 5: mod_base = OTHER; note = 2'-deoxy-2'-fluoroadenosine-3'-phosphate
  modified_base 6: mod_base = OTHER; note = 2'-O-methyladenosine-3'-phosphate
  modified_base 7: mod_base = OTHER; note = 2'-deoxy-2'-fluorocytidine-3'-phosphate
  modified_base 8: mod_base = OTHER; note = 2'-O-methylcytidine-3'-phosphate
  modified_base 9: mod_base = OTHER; note = 2'-deoxy-2'-fluoroadenosine-3'-phosphate
  modified_base 10: mod_base = OTHER; note = 2'-O-methyladenosine-3'-phosphate
  modified_base 11: mod_base = OTHER; note = 2'-deoxy-2'-fluoroguanosine-3'-phosphate
  modified_base 12: mod_base = OTHER; note = 2'-O-methyladenosine-3'-phosphate
  modified_base 13: mod_base = OTHER; note = 2'-deoxy-2'-fluoroguanosine-3'-phosphate
  modified_base 14: mod_base = OTHER; note = 2'-O-methyluridine-3'-phosphate
  modified_base 15: mod_base = OTHER; note = 2'-deoxy-2'-fluoroadenosine-3'-phosphate
  modified_base 16: mod_base = OTHER; note = 2'-O-methyluridine-3'-phosphate
  modified_base 17: mod_base = OTHER; note = 2'-deoxy-2'-fluorouridine-3'-phosphate
  modified_base 18: mod_base = OTHER; note = 2'-O-methylcytidine-3'-phosphate
  modified_base 19: mod_base = OTHER; note = 2'-O-methylcytidine-3'-phosphate
  modified_base 20: mod_base = OTHER; note = 2'-O-methyladenosine-3'-phosphorothioate
  modified_base 21: mod_base = OTHER; note = 2'-deoxy-2'-fluorouridine
atgtaaccaagagtattccat

SEQ ID NO: 115 - RNA, 21 nt, synthetic construct
  source 1..21: mol_type = other RNA
  modified_base 1: mod_base = OTHER; note = 2'-deoxy-2'-fluoroadenosine-3'-phosphate
  modified_base 2: mod_base = OTHER; note = 2'-O-methyluridine-3'-phosphate
  modified_base 3: mod_base = OTHER; note = 2'-deoxy-2'-fluoroguanosine-3'-phosphate
  modified_base 4: mod_base = OTHER; note = 2'-O-methyluridine-3'-phosphate
  modified_base 5: mod_base = OTHER; note = 2'-deoxy-2'-fluoroadenosine-3'-phosphate
  modified_base 6: mod_base = OTHER; note = 2'-O-methyladenosine-3'-phosphate
  modified_base 7: mod_base = OTHER; note = 2'-deoxy-2'-fluorocytidine-3'-phosphate
  modified_base 8: mod_base = OTHER; note = 2'-O-methylcytidine-3'-phosphate
  modified_base 9: mod_base = OTHER; note = 2'-deoxy-2'-fluoroadenosine-3'-phosphate
  modified_base 10: mod_base = OTHER; note = 2'-O-methyladenosine-3'-phosphate
  modified_base 11: mod_base = OTHER; note = 2'-deoxy-2'-fluoroguanosine-3'-phosphate
  modified_base 12: mod_base = OTHER; note = 2'-O-methyladenosine-3'-phosphate
  modified_base 13: mod_base = OTHER; note = 2'-O-methylguanosine-3'-phosphate
  modified_base 14: mod_base = OTHER; note = 2'-O-methyluridine-3'-phosphate
  modified_base 15: mod_base = OTHER; note = 2'-deoxy-2'-fluoroadenosine-3'-phosphate
  modified_base 16: mod_base = OTHER; note = 2'-deoxy-2'-fluorouridine-3'-phosphate
  modified_base 17: mod_base = OTHER; note = 2'-deoxy-2'-fluorouridine-3'-phosphate
  modified_base 18: mod_base = OTHER; note = 2'-O-methylcytidine-3'-phosphate
  modified_base 19: mod_base = OTHER; note = 2'-deoxy-2'-fluorocytidine-3'-phosphate
  modified_base 20: mod_base = OTHER; note = 2'-O-methyladenosine-3'-phosphorothioate
  modified_base 21: mod_base = OTHER; note = 2'-deoxy-2'-fluorouridine
atgtaaccaagagtattccat

SEQ ID NO: 116 - RNA, 21 nt, synthetic construct
  source 1..21: mol_type = other RNA
  modified_base 1: mod_base = OTHER; note = 2'-deoxy-2'-fluoroadenosine-3'-phosphate
  modified_base 2: mod_base = OTHER; note = 2'-O-methyluridine-3'-phosphate
  modified_base 3: mod_base = OTHER; note = 2'-deoxy-2'-fluoroguanosine-3'-phosphate
  modified_base 4: mod_base = OTHER; note = 2'-O-methyluridine-3'-phosphate
  modified_base 5: mod_base = OTHER; note = 2'-deoxy-2'-fluoroadenosine-3'-phosphate
  modified_base 6: mod_base = OTHER; note = 2'-O-methyladenosine-3'-phosphate
  modified_base 7: mod_base = OTHER; note = 2'-deoxy-2'-fluorocytidine-3'-phosphate
  modified_base 8: mod_base = OTHER; note = 2'-O-methylcytidine-3'-phosphate
  modified_base 9: mod_base = OTHER; note = 2'-deoxy-2'-fluoroadenosine-3'-phosphate
  modified_base 10: mod_base = OTHER; note = 2'-O-methyladenosine-3'-phosphate
  modified_base 11: mod_base = OTHER; note = 2'-deoxy-2'-fluoroguanosine-3'-phosphate
  modified_base 12: mod_base = OTHER; note = 2'-O-methyladenosine-3'-phosphate
  modified_base 13: mod_base = OTHER; note = 2'-deoxy-2'-fluoroguanosine-3'-phosphate
  modified_base 14: mod_base = OTHER; note = 2'-O-methyluridine-3'-phosphate
  modified_base 15: mod_base = OTHER; note = 2'-deoxy-2'-fluoroadenosine-3'-phosphate
  modified_base 16: mod_base = OTHER; note = 2'-O-methyluridine-3'-phosphate
  modified_base 17: mod_base = OTHER; note = 2'-deoxy-2'-fluorouridine-3'-phosphate
  modified_base 18: mod_base = OTHER; note = 2'-O-methylcytidine-3'-phosphate
  modified_base 19: mod_base = OTHER; note = 2'-deoxy-2'-fluorocytidine-3'-phosphate
  modified_base 20: mod_base = OTHER; note = 2'-O-methyladenosine-3'-phosphorothioate
  modified_base 21: mod_base = OTHER; note = 2'-deoxy-2'-fluorouridine
atgtaaccaagagtattccat

SEQ ID NO: 117 - RNA, 21 nt, synthetic construct
  source 1..21: mol_type = other RNA
  modified_base 1: mod_base = OTHER; note = 2'-deoxy-2'-fluoroadenosine-3'-phosphate
  modified_base 2: mod_base = OTHER; note = 2'-O-methyluridine-3'-phosphate
  modified_base 3: mod_base = OTHER; note = 2'-deoxy-2'-fluoroguanosine-3'-phosphate
  modified_base 4: mod_base = OTHER; note = 2'-deoxy-2'-fluorouridine-3'-phosphate
  modified_base 5: mod_base = OTHER; note = 2'-deoxy-2'-fluoroadenosine-3'-phosphate
  modified_base 6: mod_base = OTHER; note = 2'-O-methyladenosine-3'-phosphate
  modified_base 7: mod_base = OTHER; note = 2'-O-methylcytidine-3'-phosphate
  modified_base 8: mod_base = OTHER; note = 2'-O-methylcytidine-3'-phosphate
  modified_base 9: mod_base = OTHER; note = 2'-deoxy-2'-fluoroadenosine-3'-phosphate
  modified_base 10: mod_base = OTHER; note = 2'-O-methyladenosine-3'-phosphate
  modified_base 11: mod_base = OTHER; note = 2'-deoxy-2'-fluoroguanosine-3'-phosphate
  modified_base 12: mod_base = OTHER; note = 2'-O-methyladenosine-3'-phosphate
  modified_base 13: mod_base = OTHER; note = 2'-deoxy-2'-fluoroguanosine-3'-phosphate
  modified_base 14: mod_base = OTHER; note = 2'-O-methyluridine-3'-phosphate
  modified_base 15: mod_base = OTHER; note = 2'-deoxy-2'-fluoroadenosine-3'-phosphate
  modified_base 16: mod_base = OTHER; note = 2'-O-methyluridine-3'-phosphate
  modified_base 17: mod_base = OTHER; note = 2'-deoxy-2'-fluorouridine-3'-phosphate
  modified_base 18: mod_base = OTHER; note = 2'-O-methylcytidine-3'-phosphate
  modified_base 19: mod_base = OTHER; note = 2'-deoxy-2'-fluorocytidine-3'-phosphate
  modified_base 20: mod_base = OTHER; note = 2'-O-methyladenosine-3'-phosphorothioate
  modified_base 21: mod_base = OTHER; note = 2'-deoxy-2'-fluorouridine
atgtaaccaagagtattccat

SEQ ID NO: 118 - RNA, 21 nt, synthetic construct
  source 1..21: mol_type = other RNA
  modified_base 1: mod_base = OTHER; note = 2'-deoxy-2'-fluoroadenosine-3'-phosphate
  modified_base 2: mod_base = OTHER; note = 2'-O-methyluridine-3'-phosphate
  modified_base 3: mod_base = OTHER; note = 2'-deoxy-2'-fluoroguanosine-3'-phosphate
  modified_base 4: mod_base = OTHER; note = 2'-O-methyluridine-3'-phosphate
  modified_base 5: mod_base = OTHER; note = 2'-deoxy-2'-fluoroadenosine-3'-phosphate
  modified_base 6: mod_base = OTHER; note = 2'-O-methyladenosine-3'-phosphate
  modified_base 7: mod_base = OTHER; note = 2'-deoxy-2'-fluorocytidine-3'-phosphate
  modified_base 8: mod_base = OTHER; note = 2'-O-methylcytidine-3'-phosphate
  modified_base 9: mod_base = OTHER; note = 2'-deoxy-2'-fluoroadenosine-3'-phosphate
  modified_base 10: mod_base = OTHER; note = 2'-O-methyladenosine-3'-phosphate
  modified_base 11: mod_base = OTHER; note = 2'-deoxy-2'-fluoroguanosine-3'-phosphate
  modified_base 12: mod_base = OTHER; note = 2'-O-methyladenosine-3'-phosphate
  modified_base 13: mod_base = OTHER; note = 2'-O-methylguanosine-3'-phosphate
  modified_base 14: mod_base = OTHER; note = 2'-O-methyluridine-3'-phosphate
  modified_base 15: mod_base = OTHER; note = 2'-deoxy-2'-fluoroadenosine-3'-phosphate
  modified_base 16: mod_base = OTHER; note = 2'-O-methyluridine-3'-phosphate
  modified_base 17: mod_base = OTHER; note = 2'-deoxy-2'-fluorouridine-3'-phosphate
  modified_base 18: mod_base = OTHER; note = 2'-O-methylcytidine-3'-phosphate
  modified_base 19: mod_base = OTHER; note = 2'-deoxy-2'-fluorocytidine-3'-phosphate
  modified_base 20: mod_base = OTHER; note = 2'-O-methyladenosine-3'-phosphorothioate
  modified_base 21: mod_base = OTHER; note = 2'-deoxy-2'-fluorouridine
atgtaaccaagagtattccat

SEQ ID NO: 119 - RNA, 21 nt, synthetic construct
  source 1..21: mol_type = other RNA
  modified_base 1: mod_base = OTHER; note = 2'-O-methyladenosine-3'-phosphate
  modified_base 2: mod_base = OTHER; note = 2'-O-methyluridine-3'-phosphate
  modified_base 3: mod_base = OTHER; note = 2'-deoxy-2'-fluoroguanosine-3'-phosphate
  modified_base 4: mod_base = OTHER; note = 2'-O-methyluridine-3'-phosphate
  modified_base 5: mod_base = OTHER; note = 2'-deoxy-2'-fluoroadenosine-3'-phosphate
  modified_base 6: mod_base = OTHER; note = 2'-O-methyladenosine-3'-phosphate
  modified_base 7: mod_base = OTHER; note = 2'-deoxy-2'-fluorocytidine-3'-phosphate
  modified_base 8: mod_base = OTHER; note = 2'-O-methylcytidine-3'-phosphate
  modified_base 9: mod_base = OTHER; note = 2'-deoxy-2'-fluoroadenosine-3'-phosphate
  modified_base 10: mod_base = OTHER; note = 2'-O-methyladenosine-3'-phosphate
  modified_base 11: mod_base = OTHER; note = 2'-deoxy-2'-fluoroguanosine-3'-phosphate
  modified_base 12: mod_base = OTHER; note = 2'-O-methyladenosine-3'-phosphate
  modified_base 13: mod_base = OTHER; note = 2'-deoxy-2'-fluoroguanosine-3'-phosphate
  modified_base 14: mod_base = OTHER; note = 2'-deoxy-2'-fluorouridine-3'-phosphate
  modified_base 15: mod_base = OTHER; note = 2'-deoxy-2'-fluoroadenosine-3'-phosphate
  modified_base 16: mod_base = OTHER; note = 2'-O-methyluridine-3'-phosphate
  modified_base 17: mod_base = OTHER; note = 2'-deoxy-2'-fluorouridine-3'-phosphate
  modified_base 18: mod_base = OTHER; note = 2'-O-methylcytidine-3'-phosphate
  modified_base 19: mod_base = OTHER; note = 2'-deoxy-2'-fluorocytidine-3'-phosphate
  modified_base 20: mod_base = OTHER; note = 2'-O-methyladenosine-3'-phosphorothioate
  modified_base 21: mod_base = OTHER; note = 2'-deoxy-2'-fluorouridine
atgtaaccaagagtattccat

SEQ ID NO: 120 - RNA, 21 nt, synthetic construct
  source 1..21: mol_type = other RNA
  modified_base 1: mod_base = OTHER; note = 2'-deoxy-2'-fluoroadenosine-3'-phosphate
  modified_base 2: mod_base = OTHER; note = 2'-O-methyluridine-3'-phosphate
  modified_base 3: mod_base = OTHER; note = 2'-O-methylguanosine-3'-phosphate
  modified_base 4: mod_base = OTHER; note = 2'-O-methyluridine-3'-phosphate
  modified_base 5: mod_base = OTHER; note = 2'-deoxy-2'-fluoroadenosine-3'-phosphate
  modified_base 6: mod_base = OTHER; note = 2'-O-methyladenosine-3'-phosphate
  modified_base 7: mod_base = OTHER; note = 2'-deoxy-2'-fluorocytidine-3'-phosphate
  modified_base 8: mod_base = OTHER; note = 2'-O-methylcytidine-3'-phosphate
  modified_base 9: mod_base = OTHER; note = 2'-deoxy-2'-fluoroadenosine-3'-phosphate
  modified_base 10: mod_base = OTHER; note = 2'-O-methyladenosine-3'-phosphate
  modified_base 11: mod_base = OTHER; note = 2'-deoxy-2'-fluoroguanosine-3'-phosphate
  modified_base 12: mod_base = OTHER; note = 2'-O-methyladenosine-3'-phosphate
  modified_base 13: mod_base = OTHER; note = 2'-deoxy-2'-fluoroguanosine-3'-phosphate
  modified_base 14: mod_base = OTHER; note = 2'-deoxy-2'-fluorouridine-3'-phosphate
  modified_base 15: mod_base = OTHER; note = 2'-deoxy-2'-fluoroadenosine-3'-phosphate
  modified_base 16: mod_base = OTHER; note = 2'-O-methyluridine-3'-phosphate
  modified_base 17: mod_base = OTHER; note = 2'-deoxy-2'-fluorouridine-3'-phosphate
  modified_base 18: mod_base = OTHER; note = 2'-O-methylcytidine-3'-phosphate
  modified_base 19: mod_base = OTHER; note = 2'-deoxy-2'-fluorocytidine-3'-phosphate
  modified_base 20: mod_base = OTHER; note = 2'-O-methyladenosine-3'-phosphorothioate
  modified_base 21: mod_base = OTHER; note = 2'-deoxy-2'-fluorouridine
atgtaaccaagagtattccat

SEQ ID NO: 121 - RNA, 21 nt, synthetic construct
  source 1..21: mol_type = other RNA
  modified_base 1: mod_base = OTHER; note = 2'-deoxy-2'-fluoroadenosine-3'-phosphate
  modified_base 2: mod_base = OTHER; note = 2'-O-methyluridine-3'-phosphate
  modified_base 3: mod_base = OTHER; note = 2'-deoxy-2'-fluoroguanosine-3'-phosphate
  modified_base 4: mod_base = OTHER; note = 2'-O-methyluridine-3'-phosphate
  modified_base 5: mod_base = OTHER; note = 2'-deoxy-2'-fluoroadenosine-3'-phosphate
  modified_base 6: mod_base = OTHER; note = 2'-O-methyladenosine-3'-phosphate
  modified_base 7: mod_base = OTHER; note = 2'-deoxy-2'-fluorocytidine-3'-phosphate
  modified_base 8: mod_base = OTHER; note = 2'-O-methylcytidine-3'-phosphate
  modified_base 9: mod_base = OTHER; note = 2'-deoxy-2'-fluoroadenosine-3'-phosphate
  modified_base 10: mod_base = OTHER; note = 2'-O-methyladenosine-3'-phosphate
  modified_base 11: mod_base = OTHER; note = 2'-deoxy-2'-fluoroguanosine-3'-phosphate
  modified_base 12: mod_base = OTHER; note = 2'-O-methyladenosine-3'-phosphate
  modified_base 13: mod_base = OTHER; note = 2'-deoxy-2'-fluoroguanosine-3'-phosphate
  modified_base 14: mod_base = OTHER; note = 2'-O-methyluridine-3'-phosphate
  modified_base 15: mod_base = OTHER; note = 2'-deoxy-2'-fluoroadenosine-3'-phosphate
  modified_base 16: mod_base = OTHER; note = 2'-O-methyluridine-3'-phosphate
  modified_base 17: mod_base = OTHER; note = 2'-deoxy-2'-fluorouridine-3'-phosphate
  modified_base 18: mod_base = OTHER; note = 2'-O-methylcytidine-3'-phosphate
  modified_base 19: mod_base = OTHER; note = 2'-deoxy-2'-fluorocytidine-3'-phosphate
  modified_base 20: mod_base = OTHER; note = 2'-O-methyladenosine-3'-phosphorothioate
  modified_base 21: mod_base = OTHER; note = 2'-deoxy-2'-fluorouridine
atgtaaccaagagtattccat

SEQ ID NO: 122 - RNA, 21 nt, synthetic construct
  source 1..21: mol_type = other RNA
  modified_base 1: mod_base = OTHER; note = 2'-deoxy-2'-fluoroadenosine-3'-phosphate
  modified_base 2: mod_base = OTHER; note = 2'-O-methyluridine-3'-phosphate
  modified_base 3: mod_base = OTHER; note = 2'-deoxy-2'-fluoroguanosine-3'-phosphate
  modified_base 4: mod_base = OTHER; note = 2'-O-methyluridine-3'-phosphate
  modified_base 5: mod_base = OTHER; note = 2'-O-methyladenosine-3'-phosphate
  modified_base 6: mod_base = OTHER; note = 2'-O-methyladenosine-3'-phosphate
  modified_base 7: mod_base = OTHER; note = 2'-deoxy-2'-fluorocytidine-3'-phosphate
  modified_base 8: mod_base = OTHER; note = 2'-O-methylcytidine-3'-phosphate
  modified_base 9: mod_base = OTHER; note = 2'-deoxy-2'-fluoroadenosine-3'-phosphate
  modified_base 10: mod_base = OTHER; note = 2'-O-methyladenosine-3'-phosphate
  modified_base 11: mod_base = OTHER; note = 2'-deoxy-2'-fluoroguanosine-3'-phosphate
  modified_base 12: mod_base = OTHER; note = 2'-O-methyladenosine-3'-phosphate
  modified_base 13: mod_base = OTHER; note = 2'-deoxy-2'-fluoroguanosine-3'-phosphate
  modified_base 14: mod_base = OTHER; note = 2'-deoxy-2'-fluorouridine-3'-phosphate
  modified_base 15: mod_base = OTHER; note = 2'-deoxy-2'-fluoroadenosine-3'-phosphate
  modified_base 16: mod_base = OTHER; note = 2'-O-methyluridine-3'-phosphate
  modified_base 17: mod_base = OTHER; note = 2'-deoxy-2'-fluorouridine-3'-phosphate
  modified_base 18: mod_base = OTHER; note = 2'-O-methylcytidine-3'-phosphate
  modified_base 19: mod_base = OTHER; note = 2'-deoxy-2'-fluorocytidine-3'-phosphate
  modified_base 20: mod_base = OTHER; note = 2'-O-methyladenosine-3'-phosphorothioate
  modified_base 21: mod_base = OTHER; note = 2'-deoxy-2'-fluorouridine
atgtaaccaagagtattccat

SEQ ID NO: 123 - RNA, 21 nt, synthetic construct
  source 1..21: mol_type = other RNA
  modified_base 1: mod_base = OTHER; note = 2'-O-methyladenosine-3'-phosphate
  modified_base 2: mod_base = OTHER; note = 2'-O-methyluridine-3'-phosphate
  modified_base 3: mod_base = OTHER; note = 2'-O-methylguanosine-3'-phosphate
  modified_base 4: mod_base = OTHER; note = 2'-O-methyluridine-3'-phosphate
  modified_base 5: mod_base = OTHER; note = 2'-O-methyladenosine-3'-phosphate
  modified_base 6: mod_base = OTHER; note = 2'-O-methyladenosine-3'-phosphate
  modified_base 7: mod_base = OTHER; note = 2'-O-methylcytidine-3'-phosphate
  modified_base 8: mod_base = OTHER; note = 2'-O-methylcytidine-3'-phosphate
  modified_base 9: mod_base = OTHER; note = 2'-O-methyladenosine-3'-phosphate
  modified_base 10: mod_base = OTHER; note = 2'-O-methyladenosine-3'-phosphate
  modified_base 11: mod_base = OTHER; note = 2'-O-methylguanosine-3'-phosphate
  modified_base 12: mod_base = OTHER; note = 2'-O-methyladenosine-3'-phosphate
  modified_base 13: mod_base = OTHER; note = 2'-O-methylguanosine-3'-phosphate
  modified_base 14: mod_base = OTHER; note = 2'-O-methyluridine-3'-phosphate
  modified_base 15: mod_base = OTHER; note = 2'-O-methyladenosine-3'-phosphate
  modified_base 16: mod_base = OTHER; note = 2'-O-methyluridine-3'-phosphate
  modified_base 17: mod_base = OTHER; note = 2'-O-methyluridine-3'-phosphate
  modified_base 18: mod_base = OTHER; note = 2'-O-methylcytidine-3'-phosphate
  modified_base 19: mod_base = OTHER; note = 2'-O-methylcytidine-3'-phosphate
  modified_base 20: mod_base = OTHER; note = 2'-O-methyladenosine-3'-phosphorothioate
  modified_base 21: mod_base = OTHER; note = 2'-O-methyluridine
atgtaaccaagagtattccat

SEQ ID NO: 124 - RNA, 21 nt, synthetic construct
  source 1..21: mol_type = other RNA
  modified_base 1: mod_base = OTHER; note = 2'-deoxy-2'-fluoroadenosine-3'-phosphate
  modified_base 2: mod_base = OTHER; note = 2'-O-methyluridine-3'-phosphate
  modified_base 3: mod_base = OTHER; note = 2'-deoxy-2'-fluoroguanosine-3'-phosphate
  modified_base 4: mod_base = OTHER; note = 2'-O-methyluridine-3'-phosphate
  modified_base 5: mod_base = OTHER; note = 2'-deoxy-2'-fluoroadenosine-3'-phosphate
  modified_base 6: mod_base = OTHER; note = 2'-O-methyladenosine-3'-phosphate
  modified_base 7: mod_base = OTHER; note = 2'-deoxy-2'-fluorocytidine-3'-phosphate
  modified_base 8: mod_base = OTHER; note = 2'-O-methylcytidine-3'-phosphate
  modified_base 9: mod_base = OTHER; note = 2'-deoxy-2'-fluoroadenosine-3'-phosphate
  modified_base 10: mod_base = OTHER; note = 2'-O-methyladenosine-3'-phosphate
  modified_base 11: mod_base = OTHER; note = 2'-deoxy-2'-fluoroguanosine-3'-phosphate
  modified_base 12: mod_base = OTHER; note = 2'-O-methyladenosine-3'-phosphate
  modified_base 13: mod_base = OTHER; note = 2'-deoxy-2'-fluoroguanosine-3'-phosphate
  modified_base 14: mod_base = OTHER; note = 2'-O-methyluridine-3'-phosphate
  modified_base 15: mod_base = OTHER; note = 2'-deoxy-2'-fluoroadenosine-3'-phosphate
  modified_base 16: mod_base = OTHER; note = 2'-O-methyluridine-3'-phosphate
  modified_base 17: mod_base = OTHER; note = 2'-deoxy-2'-fluorouridine-3'-phosphate
  modified_base 18: mod_base = OTHER; note = 2'-O-methylcytidine-3'-phosphate
  modified_base 19: mod_base = OTHER; note = 2'-deoxy-2'-fluorocytidine-3'-phosphate
  modified_base 20: mod_base = OTHER; note = 2'-O-methyladenosine-3'-phosphorothioate
  modified_base 21: mod_base = OTHER; note = 2'-deoxy-2'-fluorouridine
atgtaaccaagagtattccat

SEQ ID NO: 125 - RNA, 21 nt, synthetic construct
  source 1..21: mol_type = other RNA
  modified_base 1: mod_base = OTHER; note = 2'-deoxy-2'-fluoroadenosine-3'-phosphate
  modified_base 2: mod_base = OTHER; note = 2'-O-methyluridine-3'-phosphate
  modified_base 3: mod_base = OTHER; note = 2'-deoxy-2'-fluoroguanosine-3'-phosphate
  modified_base 4: mod_base = OTHER; note = 2'-O-methyluridine-3'-phosphate
  modified_base 5: mod_base = OTHER; note = 2'-deoxy-2'-fluoroadenosine-3'-phosphate
  modified_base 6: mod_base = OTHER; note = 2'-O-methyladenosine-3'-phosphate
  modified_base 7: mod_base = OTHER; note = 2'-deoxy-2'-fluorocytidine-3'-phosphate
  modified_base 8: mod_base = OTHER; note = 2'-O-methylcytidine-3'-phosphate
  modified_base 9: mod_base = OTHER; note = 2'-deoxy-2'-fluoroadenosine-3'-phosphate
  modified_base 10: mod_base = OTHER; note = 2'-O-methyladenosine-3'-phosphate
  modified_base 11: mod_base = OTHER; note = 2'-deoxy-2'-fluoroguanosine-3'-phosphate
  modified_base 12: mod_base = OTHER; note = 2'-O-methyladenosine-3'-phosphate
  modified_base 13: mod_base = OTHER; note = 2'-deoxy-2'-fluoroguanosine-3'-phosphate
  modified_base 14: mod_base = OTHER; note = 2'-O-methyluridine-3'-phosphate
  modified_base 15: mod_base = OTHER; note = 2'-deoxy-2'-fluoroadenosine-3'-phosphate
  modified_base 16: mod_base = OTHER; note = 2'-O-methyluridine-3'-phosphate
  modified_base 17: mod_base = OTHER; note = 2'-deoxy-2'-fluorouridine-3'-phosphate
  modified_base 18: mod_base = OTHER; note = 2'-O-methylcytidine-3'-phosphate
  modified_base 19: mod_base = OTHER; note = 2'-deoxy-2'-fluorocytidine-3'-phosphate
  modified_base 20: mod_base = OTHER; note = 2'-O-methyladenosine-3'-phosphorothioate
  modified_base 21: mod_base = OTHER; note = 2'-deoxy-2'-fluorouridine
atgtaaccaagagtattccat

SEQ ID NO: 126 - RNA, 21 nt, synthetic construct
  source 1..21: mol_type = other RNA
  modified_base 1: mod_base = OTHER; note = 2'-deoxy-2'-fluoroadenosine-3'-phosphate
  modified_base 2: mod_base = OTHER; note = 2'-O-methyluridine-3'-phosphate
  modified_base 3: mod_base = OTHER; note = 2'-deoxy-2'-fluoroguanosine-3'-phosphate
  modified_base 4: mod_base = OTHER; note = 2'-O-methyluridine-3'-phosphate
  modified_base 5: mod_base = OTHER; note = 2'-deoxy-2'-fluoroadenosine-3'-phosphate
  modified_base 6: mod_base = OTHER; note = 2'-O-methyladenosine-3'-phosphate
  modified_base 7: mod_base = OTHER; note = 2'-O-methylcytidine-3'-phosphate
  modified_base 8: mod_base = OTHER; note = 2'-O-methylcytidine-3'-phosphate
  modified_base 9: mod_base = OTHER; note = 2'-deoxy-2'-fluoroadenosine-3'-phosphate
  modified_base 10: mod_base = OTHER; note = 2'-O-methyladenosine-3'-phosphate
  modified_base 11: mod_base = OTHER; note = 2'-deoxy-2'-fluoroguanosine-3'-phosphate
  modified_base 12: mod_base = OTHER; note = 2'-O-methyladenosine-3'-phosphate
  modified_base 13: mod_base = OTHER; note = 2'-deoxy-2'-fluoroguanosine-3'-phosphate
  modified_base 14: mod_base = OTHER; note = 2'-O-methyluridine-3'-phosphate
  modified_base 15: mod_base = OTHER; note = 2'-deoxy-2'-fluoroadenosine-3'-phosphate
  modified_base 16: mod_base = OTHER; note = 2'-O-methyluridine-3'-phosphate
  modified_base 17: mod_base = OTHER; note = 2'-deoxy-2'-fluorouridine-3'-phosphate
  modified_base 18: mod_base = OTHER; note = 2'-O-methylcytidine-3'-phosphate
  modified_base 19: mod_base = OTHER; note = 2'-deoxy-2'-fluorocytidine-3'-phosphate
  modified_base 20: mod_base = OTHER; note = 2'-O-methyladenosine-3'-phosphorothioate
  modified_base 21: mod_base = OTHER; note = 2'-deoxy-2'-fluorouridine
atgtaaccaagagtattccat

SEQ ID NO: 127 - RNA, 21 nt, synthetic construct
  source 1..21: mol_type = other RNA
  modified_base 1: mod_base = OTHER; note = 2'-deoxy-2'-fluoroadenosine-3'-phosphate
  modified_base 2: mod_base = OTHER; note = 2'-deoxy-2'-fluorouridine-3'-phosphate
  modified_base 3: mod_base = OTHER; note = 2'-deoxy-2'-fluoroguanosine-3'-phosphate
  modified_base 4: mod_base = OTHER; note = 2'-O-methyluridine-3'-phosphate
  modified_base 5: mod_base = OTHER; note = 2'-deoxy-2'-fluoroadenosine-3'-phosphate
  modified_base 6: mod_base = OTHER; note = 2'-O-methyladenosine-3'-phosphate
  modified_base 7: mod_base = OTHER; note = 2'-deoxy-2'-fluorocytidine-3'-phosphate
  modified_base 8: mod_base = OTHER; note = 2'-O-methylcytidine-3'-phosphate
  modified_base 9: mod_base = OTHER; note = 2'-deoxy-2'-fluoroadenosine-3'-phosphate
  modified_base 10: mod_base = OTHER; note = 2'-O-methyladenosine-3'-phosphate
  modified_base 11: mod_base = OTHER; note = 2'-deoxy-2'-fluoroguanosine-3'-phosphate
  modified_base 12: mod_base = OTHER; note = 2'-O-methyladenosine-3'-phosphate
  modified_base 13: mod_base = OTHER; note = 2'-deoxy-2'-fluoroguanosine-3'-phosphate
  modified_base 14: mod_base = OTHER; note = 2'-O-methyluridine-3'-phosphate
  modified_base 15: mod_base = OTHER; note = 2'-deoxy-2'-fluoroadenosine-3'-phosphate
  modified_base 16: mod_base = OTHER; note = 2'-O-methyluridine-3'-phosphate
  modified_base 17: mod_base = OTHER; note = 2'-deoxy-2'-fluorouridine-3'-phosphate
  modified_base 18: mod_base = OTHER; note = 2'-O-methylcytidine-3'-phosphate
  modified_base 19: mod_base = OTHER; note = 2'-O-methylcytidine-3'-phosphate
  modified_base 20: mod_base = OTHER; note = 2'-O-methyladenosine-3'-phosphorothioate
  modified_base 21: mod_base = OTHER; note = 2'-deoxy-2'-fluorouridine
atgtaaccaagagtattccat

SEQ ID NO: 128 - RNA, 21 nt, synthetic construct
  source 1..21: mol_type = other RNA
  modified_base 1: mod_base = OTHER; note = 2'-O-methyladenosine-3'-phosphate
  modified_base 2: mod_base = OTHER; note = 2'-O-methyluridine-3'-phosphate
  modified_base 3: mod_base = OTHER; note = 2'-deoxy-2'-fluoroguanosine-3'-phosphate
  modified_base 4: mod_base = OTHER; note = 2'-O-methyluridine-3'-phosphate
  modified_base 5: mod_base = OTHER; note = 2'-deoxy-2'-fluoroadenosine-3'-phosphate
  modified_base 6: mod_base = OTHER; note = 2'-deoxy-2'-fluoroadenosine-3'-phosphate
  modified_base 7: mod_base = OTHER; note = 2'-deoxy-2'-fluorocytidine-3'-phosphate
  modified_base 8: mod_base = OTHER; note = 2'-O-methylcytidine-3'-phosphate
  modified_base 9: mod_base = OTHER; note = 2'-deoxy-2'-fluoroadenosine-3'-phosphate
  modified_base 10: mod_base = OTHER; note = 2'-O-methyladenosine-3'-phosphate
  modified_base 11: mod_base = OTHER; note = 2'-deoxy-2'-fluoroguanosine-3'-phosphate
  modified_base 12: mod_base = OTHER; note = 2'-O-methyladenosine-3'-phosphate
  modified_base 13: mod_base = OTHER; note = 2'-deoxy-2'-fluoroguanosine-3'-phosphate
  modified_base 14: mod_base = OTHER; note = 2'-O-methyluridine-3'-phosphate
  modified_base 15: mod_base = OTHER; note = 2'-deoxy-2'-fluoroadenosine-3'-phosphate
  modified_base 16: mod_base = OTHER; note = 2'-O-methyluridine-3'-phosphate
  modified_base 17: mod_base = OTHER; note = 2'-deoxy-2'-fluorouridine-3'-phosphate
  modified_base 18: mod_base = OTHER; note = 2'-O-methylcytidine-3'-phosphate
  modified_base 19: mod_base = OTHER; note = 2'-deoxy-2'-fluorocytidine-3'-phosphate
  modified_base 20: mod_base = OTHER; note = 2'-O-methyladenosine-3'-phosphorothioate
  modified_base 21: mod_base = OTHER; note = 2'-deoxy-2'-fluorouridine
atgtaaccaagagtattccat

SEQ ID NO: 129 - RNA, 21 nt, synthetic construct
  source 1..21: mol_type = other RNA
  modified_base 1: mod_base = OTHER; note = 2'-deoxy-2'-fluoroadenosine-3'-phosphate
  modified_base 2: mod_base = OTHER; note = 2'-O-methyluridine-3'-phosphate
  modified_base 3: mod_base = OTHER; note = 2'-deoxy-2'-fluoroguanosine-3'-phosphate
  modified_base 4: mod_base = OTHER; note = 2'-O-methyluridine-3'-phosphate
  modified_base 5: mod_base = OTHER; note = 2'-deoxy-2'-fluoroadenosine-3'-phosphate
  modified_base 6: mod_base = OTHER; note = 2'-O-methyladenosine-3'-phosphate
  modified_base 7: mod_base = OTHER; note = 2'-deoxy-2'-fluorocytidine-3'-phosphate
  modified_base 8: mod_base = OTHER; note = 2'-O-methylcytidine-3'-phosphate
  modified_base 9: mod_base = OTHER; note = 2'-deoxy-2'-fluoroadenosine-3'-phosphate
  modified_base 10: mod_base = OTHER; note = 2'-O-methyladenosine-3'-phosphate
  modified_base 11: mod_base = OTHER; note = 2'-deoxy-2'-fluoroguanosine-3'-phosphate
  modified_base 12: mod_base = OTHER; note = 2'-O-methyladenosine-3'-phosphate
  modified_base 13: mod_base = OTHER; note = 2'-deoxy-2'-fluoroguanosine-3'-phosphate
  modified_base 14: mod_base = OTHER; note = 2'-O-methyluridine-3'-phosphate
  modified_base 15: mod_base = OTHER; note = 2'-deoxy-2'-fluoroadenosine-3'-phosphate
  modified_base 16: mod_base = OTHER; note = 2'-deoxy-2'-fluorouridine-3'-phosphate
  modified_base 17: mod_base = OTHER; note = 2'-deoxy-2'-fluorouridine-3'-phosphate
  modified_base 18: mod_base = OTHER; note = 2'-O-methylcytidine-3'-phosphate
  modified_base 19: mod_base = OTHER; note = 2'-deoxy-2'-fluorocytidine-3'-phosphate
  modified_base 20: mod_base = OTHER; note = 2'-O-methyladenosine-3'-phosphorothioate
  modified_base 21: mod_base = OTHER; note = 2'-deoxy-2'-fluorouridine
atgtaaccaagagtattccat

SEQ ID NO: 130 - RNA, 21 nt, synthetic construct
  source 1..21: mol_type = other RNA
  modified_base 1: mod_base = OTHER; note = 2'-deoxy-2'-fluoroadenosine-3'-phosphate
  modified_base 2: mod_base = OTHER; note = 2'-O-methyluridine-3'-phosphate
  modified_base 3: mod_base = OTHER; note = 2'-deoxy-2'-fluoroguanosine-3'-phosphate
  modified_base 4: mod_base = OTHER; note = 2'-O-methyluridine-3'-phosphate
  modified_base 5: mod_base = OTHER; note = 2'-deoxy-2'-fluoroadenosine-3'-phosphate
  modified_base 6: mod_base = OTHER; note = 2'-O-methyladenosine-3'-phosphate
  modified_base 7: mod_base = OTHER; note = 2'-deoxy-2'-fluorocytidine-3'-phosphate
  modified_base 8: mod_base = OTHER; note = 2'-O-methylcytidine-3'-phosphate
  modified_base 9: mod_base = OTHER; note = 2'-O-methyladenosine-3'-phosphate
  modified_base 10: mod_base = OTHER; note = 2'-O-methyladenosine-3'-phosphate
  modified_base 11: mod_base = OTHER; note = 2'-deoxy-2'-fluoroguanosine-3'-phosphate
  modified_base 12: mod_base = OTHER; note = 2'-O-methyladenosine-3'-phosphate
  modified_base 13: mod_base = OTHER; note = 2'-deoxy-2'-fluoroguanosine-3'-phosphate
  modified_base 14: mod_base = OTHER; note = 2'-O-methyluridine-3'-phosphate
  modified_base 15: mod_base = OTHER; note = 2'-deoxy-2'-fluoroadenosine-3'-phosphate
  modified_base 16: mod_base = OTHER; note = 2'-O-methyluridine-3'-phosphate
  modified_base 17: mod_base = OTHER; note = 2'-deoxy-2'-fluorouridine-3'-phosphate
  modified_base 18: mod_base = OTHER; note = 2'-O-methylcytidine-3'-phosphate
  modified_base 19: mod_base = OTHER; note = 2'-deoxy-2'-fluorocytidine-3'-phosphate
  modified_base 20: mod_base = OTHER; note = 2'-O-methyladenosine-3'-phosphorothioate
  modified_base 21: mod_base = OTHER; note = 2'-deoxy-2'-fluorouridine
atgtaaccaagagtattccat

SEQ ID NO: 131 - RNA, 21 nt, synthetic construct
  source 1..21: mol_type = other RNA
  modified_base 1: mod_base = OTHER; note = 2'-deoxy-2'-fluoroadenosine-3'-phosphate
  modified_base 2: mod_base = OTHER; note = 2'-deoxy-2'-fluorouridine-3'-phosphate
  modified_base 3: mod_base = OTHER; note = 2'-deoxy-2'-fluoroguanosine-3'-phosphate
  modified_base 4: mod_base = OTHER; note = 2'-O-methyluridine-3'-phosphate
  modified_base 5: mod_base = OTHER; note = 2'-deoxy-2'-fluoroadenosine-3'-phosphate
  modified_base 6: mod_base = OTHER; note = 2'-O-methyladenosine-3'-phosphate
  modified_base 7: mod_base = OTHER; note = 2'-deoxy-2'-fluorocytidine-3'-phosphate
  modified_base 8: mod_base = OTHER; note = 2'-O-methylcytidine-3'-phosphate
  modified_base 9: mod_base = OTHER; note = 2'-deoxy-2'-fluoroadenosine-3'-phosphate
  modified_base 10: mod_base = OTHER; note = 2'-O-methyladenosine-3'-phosphate
  modified_base 11: mod_base = OTHER; note = 2'-deoxy-2'-fluoroguanosine-3'-phosphate
  modified_base 12: mod_base = OTHER; note = 2'-O-methyladenosine-3'-phosphate
  modified_base 13: mod_base = OTHER; note = 2'-deoxy-2'-fluoroguanosine-3'-phosphate
  modified_base 14: mod_base = OTHER; note = 2'-O-methyluridine-3'-phosphate
  modified_base 15: mod_base = OTHER; note = 2'-deoxy-2'-fluoroadenosine-3'-phosphate
  modified_base 16: mod_base = OTHER; note = 2'-O-methyluridine-3'-phosphate
  modified_base 17: mod_base = OTHER; note = 2'-O-methyluridine-3'-phosphate
  modified_base 18: mod_base = OTHER; note = 2'-O-methylcytidine-3'-phosphate
  modified_base 19: mod_base = OTHER; note = 2'-deoxy-2'-fluorocytidine-3'-phosphate
  modified_base 20: mod_base = OTHER; note = 2'-O-methyladenosine-3'-phosphorothioate
  modified_base 21: mod_base = OTHER; note = 2'-deoxy-2'-fluorouridine
atgtaaccaagagtattccat

SEQ ID NO: 132 - RNA, 21 nt, synthetic construct
  source 1..21: mol_type = other RNA
  modified_base 1: mod_base = OTHER; note = 2'-deoxy-2'-fluoroadenosine-3'-phosphate
  modified_base 2: mod_base = OTHER; note = 2'-O-methyluridine-3'-phosphate
  modified_base 3: mod_base = OTHER; note = 2'-O-methylguanosine-3'-phosphate
  modified_base 4: mod_base = OTHER; note = 2'-O-methyluridine-3'-phosphate
  modified_base 5: mod_base = OTHER; note = 2'-deoxy-2'-fluoroadenosine-3'-phosphate
  modified_base 6: mod_base = OTHER; note = 2'-deoxy-2'-fluoroadenosine-3'-phosphate
  modified_base 7: mod_base = OTHER; note = 2'-deoxy-2'-fluorocytidine-3'-phosphate
  modified_base 8: mod_base = OTHER; note = 2'-O-methylcytidine-3'-phosphate
  modified_base 9: mod_base = OTHER; note = 2'-deoxy-2'-fluoroadenosine-3'-phosphate
  modified_base 10: mod_base = OTHER; note = 2'-O-methyladenosine-3'-phosphate
  modified_base 11: mod_base = OTHER; note = 2'-deoxy-2'-fluoroguanosine-3'-phosphate
  modified_base 12: mod_base = OTHER; note = 2'-O-methyladenosine-3'-phosphate
  modified_base 13: mod_base = OTHER; note = 2'-deoxy-2'-fluoroguanosine-3'-phosphate
  modified_base 14: mod_base = OTHER; note = 2'-O-methyluridine-3'-phosphate
  modified_base 15: mod_base = OTHER; note = 2'-deoxy-2'-fluoroadenosine-3'-phosphate
  modified_base 16: mod_base = OTHER; note = 2'-O-methyluridine-3'-phosphate
  modified_base 17: mod_base = OTHER; note = 2'-deoxy-2'-fluorouridine-3'-phosphate
  modified_base 18: mod_base = OTHER; note = 2'-O-methylcytidine-3'-phosphate
  modified_base 19: mod_base = OTHER; note = 2'-deoxy-2'-fluorocytidine-3'-phosphate
  modified_base 20: mod_base = OTHER; note = 2'-O-methyladenosine-3'-phosphorothioate
  modified_base 21: mod_base = OTHER; note = 2'-deoxy-2'-fluorouridine
atgtaaccaagagtattccat

SEQ ID NO: 133 - RNA, 21 nt, synthetic construct
  source 1..21: mol_type = other RNA
  modified_base 1: mod_base = OTHER; note = 2'-deoxy-2'-fluoroadenosine-3'-phosphate
  modified_base 2: mod_base = OTHER; note = 2'-deoxy-2'-fluorouridine-3'-phosphate
  modified_base 3: mod_base = OTHER; note = 2'-deoxy-2'-fluoroguanosine-3'-phosphate
  modified_base 4: mod_base = OTHER; note = 2'-O-methyluridine-3'-phosphate
  modified_base 5: mod_base = OTHER; note = 2'-deoxy-2'-fluoroadenosine-3'-phosphate
  modified_base 6: mod_base = OTHER; note = 2'-O-methyladenosine-3'-phosphate
  modified_base 7: mod_base = OTHER; note = 2'-deoxy-2'-fluorocytidine-3'-phosphate
  modified_base 8: mod_base = OTHER; note = 2'-O-methylcytidine-3'-phosphate
  modified_base 9: mod_base = OTHER; note = 2'-deoxy-2'-fluoroadenosine-3'-phosphate
  modified_base 10: mod_base = OTHER; note = 2'-O-methyladenosine-3'-phosphate
  modified_base 11: mod_base = OTHER; note = 2'-deoxy-2'-fluoroguanosine-3'-phosphate
  modified_base 12: mod_base = OTHER; note = 2'-O-methyladenosine-3'-phosphate
  modified_base 13: mod_base = OTHER; note = 2'-deoxy-2'-fluoroguanosine-3'-phosphate
  modified_base 14: mod_base = OTHER; note = 2'-O-methyluridine-3'-phosphate
  modified_base 15: mod_base = OTHER; note = 2'-deoxy-2'-fluoroadenosine-3'-phosphate
  modified_base 16: mod_base = OTHER; note = 2'-O-methyluridine-3'-phosphate
  modified_base 17: mod_base = OTHER; note = 2'-deoxy-2'-fluorouridine-3'-phosphate
  modified_base 18: mod_base = OTHER; note = 2'-O-methylcytidine-3'-phosphate
  modified_base 19: mod_base = OTHER; note = 2'-deoxy-2'-fluorocytidine-3'-phosphate
  modified_base 20: mod_base = OTHER; note = 2'-O-methyladenosine-3'-phosphorothioate
  modified_base 21: mod_base = OTHER; note = 2'-deoxy-2'-fluorouridine
atgtaaccaagagtattccat

SEQ ID NO: 134 - RNA, 21 nt, synthetic construct
  source 1..21: mol_type = other RNA
  modified_base 1: mod_base = OTHER; note = 2'-deoxy-2'-fluoroadenosine-3'-phosphate
  modified_base 2: mod_base = OTHER; note = 2'-O-methyluridine-3'-phosphate
  modified_base 3: mod_base = OTHER; note = 2'-deoxy-2'-fluoroguanosine-3'-phosphate
  modified_base 4: mod_base = OTHER; note = 2'-O-methyluridine-3'-phosphate
  modified_base 5: mod_base = OTHER; note = 2'-deoxy-2'-fluoroadenosine-3'-phosphate
  modified_base 6: mod_base = OTHER; note = 2'-O-methyladenosine-3'-phosphate
  modified_base 7: mod_base = OTHER; note = 2'-deoxy-2'-fluorocytidine-3'-phosphate
  modified_base 8: mod_base = OTHER; note = 2'-O-methylcytidine-3'-phosphate
  modified_base 9: mod_base = OTHER; note = 2'-deoxy-2'-fluoroadenosine-3'-phosphate
  modified_base 10: mod_base = OTHER; note = 2'-O-methyladenosine-3'-phosphate
  modified_base 11: mod_base = OTHER; note = 2'-deoxy-2'-fluoroguanosine-3'-phosphate
  modified_base 12: mod_base = OTHER; note = 2'-O-methyladenosine-3'-phosphate
  modified_base 13: mod_base = OTHER; note = 2'-deoxy-2'-fluoroguanosine-3'-phosphate
  modified_base 14: mod_base = OTHER; note = 2'-O-methyluridine-3'-phosphate
  modified_base 15: mod_base = OTHER; note = 2'-deoxy-2'-fluoroadenosine-3'-phosphate
  modified_base 16: mod_base = OTHER; note = 2'-O-methyluridine-3'-phosphate
  modified_base 17: mod_base = OTHER; note = 2'-deoxy-2'-fluorouridine-3'-phosphate
  modified_base 18: mod_base = OTHER; note = 2'-deoxy-2'-fluorocytidine-3'-phosphate
  modified_base 19: mod_base = OTHER; note = 2'-deoxy-2'-fluorocytidine-3'-phosphate
  modified_base 20: mod_base = OTHER; note = 2'-O-methyladenosine-3'-phosphorothioate
  modified_base 21: mod_base = OTHER; note = 2'-deoxy-2'-fluorouridine
atgtaaccaagagtattccat

SEQ ID NO: 135 - RNA, 21 nt, synthetic construct
  source 1..21: mol_type = other RNA
  modified_base 1: mod_base = OTHER; note = 2'-deoxy-2'-fluoroadenosine-3'-phosphate
  modified_base 2: mod_base = OTHER; note = 2'-O-methyluridine-3'-phosphate
  modified_base 3: mod_base = OTHER; note = 2'-deoxy-2'-fluoroguanosine-3'-phosphate
  modified_base 4: mod_base = OTHER; note = 2'-O-methyluridine-3'-phosphate
  modified_base 5: mod_base = OTHER; note = 2'-deoxy-2'-fluoroadenosine-3'-phosphate
  modified_base 6: mod_base = OTHER; note = 2'-O-methyladenosine-3'-phosphate
  modified_base 7: mod_base = OTHER; note = 2'-deoxy-2'-fluorocytidine-3'-phosphate
  modified_base 8: mod_base = OTHER; note = 2'-O-methylcytidine-3'-phosphate
  modified_base 9: mod_base = OTHER; note = 2'-deoxy-2'-fluoroadenosine-3'-phosphate
  modified_base 10: mod_base = OTHER; note = 2'-O-methyladenosine-3'-phosphate
  modified_base 11: mod_base = OTHER; note = 2'-O-methylguanosine-3'-phosphate
  modified_base 12: mod_base = OTHER; note = 2'-O-methyladenosine-3'-phosphate
  modified_base 13: mod_base = OTHER; note = 2'-deoxy-2'-fluoroguanosine-3'-phosphate
  modified_base 14: mod_base = OTHER; note = 2'-O-methyluridine-3'-phosphate
  modified_base 15: mod_base = OTHER; note = 2'-deoxy-2'-fluoroadenosine-3'-phosphate
  modified_base 16: mod_base = OTHER; note = 2'-O-methyluridine-3'-phosphate
  modified_base 17: mod_base = OTHER; note = 2'-deoxy-2'-fluorouridine-3'-phosphate
  modified_base 18: mod_base = OTHER; note = 2'-O-methylcytidine-3'-phosphate
  modified_base 19: mod_base = OTHER; note = 2'-deoxy-2'-fluorocytidine-3'-phosphate
  modified_base 20: mod_base = OTHER; note = 2'-O-methyladenosine-3'-phosphorothioate
  modified_base 21: mod_base = OTHER; note = 2'-deoxy-2'-fluorouridine
atgtaaccaagagtattccat

SEQ ID NO: 136 - RNA, 21 nt, synthetic construct
  source 1..21: mol_type = other RNA
  modified_base 1: mod_base = OTHER; note = 2'-deoxy-2'-fluoroadenosine-3'-phosphate
  modified_base 2: mod_base = OTHER; note = 2'-O-methyluridine-3'-phosphate
  modified_base 3: mod_base = OTHER; note = 2'-deoxy-2'-fluoroguanosine-3'-phosphate
  modified_base 4: mod_base = OTHER; note = 2'-O-methyluridine-3'-phosphate
  modified_base 5: mod_base = OTHER; note = 2'-deoxy-2'-fluoroadenosine-3'-phosphate
  modified_base 6: mod_base = OTHER; note = 2'-deoxy-2'-fluoroadenosine-3'-phosphate
  modified_base 7: mod_base = OTHER; note = 2'-deoxy-2'-fluorocytidine-3'-phosphate
  modified_base 8: mod_base = OTHER; note = 2'-O-methylcytidine-3'-phosphate
  modified_base 9: mod_base = OTHER; note = 2'-O-methyladenosine-3'-phosphate
  modified_base 10: mod_base = OTHER; note = 2'-O-methyladenosine-3'-phosphate
  modified_base 11: mod_base = OTHER; note = 2'-deoxy-2'-fluoroguanosine-3'-phosphate
  modified_base 12: mod_base = OTHER; note = 2'-O-methyladenosine-3'-phosphate
  modified_base 13: mod_base = OTHER; note = 2'-deoxy-2'-fluoroguanosine-3'-phosphate
  modified_base 14: mod_base = OTHER; note = 2'-O-methyluridine-3'-phosphate
  modified_base 15: mod_base = OTHER; note = 2'-deoxy-2'-fluoroadenosine-3'-phosphate
  modified_base 16: mod_base = OTHER; note = 2'-O-methyluridine-3'-phosphate
  modified_base 17: mod_base = OTHER; note = 2'-deoxy-2'-fluorouridine-3'-phosphate
  modified_base 18: mod_base = OTHER; note = 2'-O-methylcytidine-3'-phosphate
  modified_base 19: mod_base = OTHER; note = 2'-deoxy-2'-fluorocytidine-3'-phosphate
  modified_base 20: mod_base = OTHER; note = 2'-O-methyladenosine-3'-phosphorothioate
  modified_base 21: mod_base = OTHER; note = 2'-deoxy-2'-fluorouridine
atgtaaccaagagtattccat

SEQ ID NO: 137 - RNA, 21 nt, synthetic construct
  source 1..21: mol_type = other RNA
  modified_base 1: mod_base = OTHER; note = 2'-deoxy-2'-fluoroadenosine-3'-phosphate
  modified_base 2: mod_base = OTHER; note = 2'-O-methyluridine-3'-phosphate
  modified_base 3: mod_base = OTHER; note = 2'-deoxy-2'-fluoroguanosine-3'-phosphate
  modified_base 4: mod_base = OTHER; note = 2'-deoxy-2'-fluorouridine-3'-phosphate
  modified_base 5: mod_base = OTHER; note = 2'-deoxy-2'-fluoroadenosine-3'-phosphate
  modified_base 6: mod_base = OTHER; note = 2'-O-methyladenosine-3'-phosphate
  modified_base 7: mod_base = OTHER; note = 2'-deoxy-2'-fluorocytidine-3'-phosphate
  modified_base 8: mod_base = OTHER; note = 2'-O-methylcytidine-3'-phosphate
  modified_base 9: mod_base = OTHER; note = 2'-deoxy-2'-fluoroadenosine-3'-phosphate
  modified_base 10: mod_base = OTHER; note = 2'-O-methyladenosine-3'-phosphate
  modified_base 11: mod_base = OTHER; note = 2'-deoxy-2'-fluoroguanosine-3'-phosphate
  modified_base 12: mod_base = OTHER; note = 2'-O-methyladenosine-3'-phosphate
  modified_base 13: mod_base = OTHER; note = 2'-deoxy-2'-fluoroguanosine-3'-phosphate
  modified_base 14: mod_base = OTHER; note = 2'-O-methyluridine-3'-phosphate
  modified_base 15: mod_base = OTHER; note = 2'-deoxy-2'-fluoroadenosine-3'-phosphate
  modified_base 16: mod_base = OTHER; note = 2'-O-methyluridine-3'-phosphate
  modified_base 17: mod_base = OTHER; note = 2'-deoxy-2'-fluorouridine-3'-phosphate
  modified_base 18: mod_base = OTHER; note = 2'-O-methylcytidine-3'-phosphate
  modified_base 19: mod_base = OTHER; note = 2'-deoxy-2'-fluorocytidine-3'-phosphate
  modified_base 20: mod_base = OTHER; note = 2'-O-methyladenosine-3'-phosphorothioate
  modified_base 21: mod_base = OTHER; note = 2'-deoxy-2'-fluorouridine
atgtaaccaagagtattccat

SEQ ID NO: 138 - RNA, 21 nt, synthetic construct
  source 1..21: mol_type = other RNA
  modified_base 1: mod_base = OTHER; note = 2'-deoxy-2'-fluoroadenosine-3'-phosphate
  modified_base 2: mod_base = OTHER; note = 2'-O-methyluridine-3'-phosphate
  modified_base 3: mod_base = OTHER; note = 2'-deoxy-2'-fluoroguanosine-3'-phosphate
  modified_base 4: mod_base = OTHER; note = 2'-O-methyluridine-3'-phosphate
  modified_base 5: mod_base = OTHER; note = 2'-deoxy-2'-fluoroadenosine-3'-phosphate
  modified_base 6: mod_base = OTHER; note = 2'-O-methyladenosine-3'-phosphate
  modified_base 7: mod_base = OTHER; note = 2'-deoxy-2'-fluorocytidine-3'-phosphate
  modified_base 8: mod_base = OTHER; note = 2'-O-methylcytidine-3'-phosphate
  modified_base 9: mod_base = OTHER; note = 2'-deoxy-2'-fluoroadenosine-3'-phosphate
  modified_base 10: mod_base = OTHER; note = 2'-O-methyladenosine-3'-phosphate
  modified_base 11: mod_base = OTHER; note = 2'-deoxy-2'-fluoroguanosine-3'-phosphate
  modified_base 12: mod_base = OTHER; note = 2'-O-methyladenosine-3'-phosphate
  modified_base 13: mod_base = OTHER; note = 2'-deoxy-2'-fluoroguanosine-3'-phosphate
  modified_base 14: mod_base = OTHER; note = 2'-O-methyluridine-3'-phosphate
  modified_base 15: mod_base = OTHER; note = 2'-deoxy-2'-fluoroadenosine-3'-phosphate
  modified_base 16: mod_base = OTHER; note = 2'-O-methyluridine-3'-phosphate
  modified_base 17: mod_base = OTHER; note = 2'-deoxy-2'-fluorouridine-3'-phosphate
  modified_base 18: mod_base = OTHER; note = 2'-O-methylcytidine-3'-phosphate
  modified_base 19: mod_base = OTHER; note = 2'-deoxy-2'-fluorocytidine-3'-phosphate
  modified_base 20: mod_base = OTHER; note = 2'-deoxy-2'-fluoroadenosine-3'-phosphorothioate
  modified_base 21: mod_base = OTHER; note = 2'-deoxy-2'-fluorouridine
atgtaaccaagagtattccat

SEQ ID NO: 139 - RNA, 21 nt, synthetic construct
  source 1..21: mol_type = other RNA
  modified_base 1: mod_base = OTHER; note = 2'-deoxy-2'-fluoroadenosine-3'-phosphate
  modified_base 2: mod_base = OTHER; note = 2'-deoxy-2'-fluorouridine-3'-phosphate
  modified_base 3: mod_base = OTHER; note = 2'-deoxy-2'-fluoroguanosine-3'-phosphate
  modified_base 4: mod_base = OTHER; note = 2'-O-methyluridine-3'-phosphate
  modified_base 5: mod_base = OTHER; note = 2'-deoxy-2'-fluoroadenosine-3'-phosphate
  modified_base 6: mod_base = OTHER; note = 2'-O-methyladenosine-3'-phosphate
  modified_base 7: mod_base = OTHER; note = 2'-deoxy-2'-fluorocytidine-3'-phosphate
  modified_base 8: mod_base = OTHER; note = 2'-O-methylcytidine-3'-phosphate
  modified_base 9: mod_base = OTHER; note = 2'-deoxy-2'-fluoroadenosine-3'-phosphate
  modified_base 10: mod_base = OTHER; note = 2'-O-methyladenosine-3'-phosphate
  modified_base 11: mod_base = OTHER; note = 2'-deoxy-2'-fluoroguanosine-3'-phosphate
  modified_base 12: mod_base = OTHER; note = 2'-O-methyladenosine-3'-phosphate
  modified_base 13: mod_base = OTHER; note = 2'-O-methylguanosine-3'-phosphate
  modified_base 14: mod_base = OTHER; note = 2'-O-methyluridine-3'-phosphate
  modified_base 15: mod_base = OTHER; note = 2'-deoxy-2'-fluoroadenosine-3'-phosphate
  modified_base 16: mod_base = OTHER; note = 2'-O-methyluridine-3'-phosphate
  modified_base 17: mod_base = OTHER; note = 2'-deoxy-2'-fluorouridine-3'-phosphate
  modified_base 18: mod_base = OTHER; note = 2'-O-methylcytidine-3'-phosphate
  modified_base 19: mod_base = OTHER; note = 2'-deoxy-2'-fluorocytidine-3'-phosphate
  modified_base 20: mod_base = OTHER; note = 2'-O-methyladenosine-3'-phosphorothioate
  modified_base 21: mod_base = OTHER; note = 2'-deoxy-2'-fluorouridine
atgtaaccaagagtattccat

SEQ ID NO: 140 - RNA, 21 nt, synthetic construct
  source 1..21: mol_type = other RNA
  modified_base 1: mod_base = OTHER; note = 2'-deoxy-2'-fluoroadenosine-3'-phosphate
  modified_base 2: mod_base = OTHER; note = 2'-O-methyluridine-3'-phosphate
  modified_base 3: mod_base = OTHER; note = 2'-deoxy-2'-fluoroguanosine-3'-phosphate
  modified_base 4: mod_base = OTHER; note = 2'-deoxy-2'-fluorouridine-3'-phosphate
  modified_base 5: mod_base = OTHER; note = 2'-deoxy-2'-fluoroadenosine-3'-phosphate
  modified_base 6: mod_base = OTHER; note = 2'-O-methyladenosine-3'-phosphate
  modified_base 7: mod_base = OTHER; note = 2'-deoxy-2'-fluorocytidine-3'-phosphate
  modified_base 8: mod_base = OTHER; note = 2'-O-methylcytidine-3'-phosphate
  modified_base 9: mod_base = OTHER; note = 2'-deoxy-2'-fluoroadenosine-3'-phosphate
  modified_base 10: mod_base = OTHER; note = 2'-O-methyladenosine-3'-phosphate
  modified_base 11: mod_base = OTHER; note = 2'-deoxy-2'-fluoroguanosine-3'-phosphate
  modified_base 12: mod_base = OTHER; note = 2'-O-methyladenosine-3'-phosphate
  modified_base 13: mod_base = OTHER; note = 2'-O-methylguanosine-3'-phosphate
  modified_base 14: mod_base = OTHER; note = 2'-O-methyluridine-3'-phosphate
  modified_base 15: mod_base = OTHER; note = 2'-deoxy-2'-fluoroadenosine-3'-phosphate
  modified_base 16: mod_base = OTHER; note = 2'-O-methyluridine-3'-phosphate
  modified_base 17: mod_base = OTHER; note = 2'-deoxy-2'-fluorouridine-3'-phosphate
  modified_base 18: mod_base = OTHER; note = 2'-O-methylcytidine-3'-phosphate
  modified_base 19: mod_base = OTHER; note = 2'-deoxy-2'-fluorocytidine-3'-phosphate
  modified_base 20: mod_base = OTHER; note = 2'-O-methyladenosine-3'-phosphorothioate
  modified_base 21: mod_base = OTHER; note = 2'-deoxy-2'-fluorouridine
atgtaaccaagagtattccat

SEQ ID NO: 141 - RNA, 21 nt, synthetic construct
  source 1..21: mol_type = other RNA
  modified_base 1: mod_base = OTHER; note = 2'-deoxy-2'-fluoroadenosine-3'-phosphate
  modified_base 2: mod_base = OTHER; note = 2'-O-methyluridine-3'-phosphate
  modified_base 3: mod_base = OTHER; note = 2'-deoxy-2'-fluoroguanosine-3'-phosphate
  modified_base 4: mod_base = OTHER; note = 2'-O-methyluridine-3'-phosphate
  modified_base 5: mod_base = OTHER; note = 2'-deoxy-2'-fluoroadenosine-3'-phosphate
  modified_base 6: mod_base = OTHER; note = 2'-deoxy-2'-fluoroadenosine-3'-phosphate
  modified_base 7: mod_base = OTHER; note = 2'-deoxy-2'-fluorocytidine-3'-phosphate
  modified_base 8: mod_base = OTHER; note = 2'-O-methylcytidine-3'-phosphate
  modified_base 9: mod_base = OTHER; note = 2'-deoxy-2'-fluoroadenosine-3'-phosphate
  modified_base 10: mod_base = OTHER; note = 2'-O-methyladenosine-3'-phosphate
  modified_base 11: mod_base = OTHER; note = 2'-O-methylguanosine-3'-phosphate
  modified_base 12: mod_base = OTHER; note = 2'-O-methyladenosine-3'-phosphate
  modified_base 13: mod_base = OTHER; note = 2'-deoxy-2'-fluoroguanosine-3'-phosphate
  modified_base 14: mod_base = OTHER; note = 2'-O-methyluridine-3'-phosphate
  modified_base 15: mod_base = OTHER; note = 2'-deoxy-2'-fluoroadenosine-3'-phosphate
  modified_base 16: mod_base = OTHER; note = 2'-O-methyluridine-3'-phosphate
  modified_base 17: mod_base = OTHER; note = 2'-deoxy-2'-fluorouridine-3'-phosphate
  modified_base 18: mod_base = OTHER; note = 2'-O-methylcytidine-3'-phosphate
  modified_base 19: mod_base = OTHER; note = 2'-deoxy-2'-fluorocytidine-3'-phosphate
  modified_base 20: mod_base = OTHER; note = 2'-O-methyladenosine-3'-phosphorothioate
  modified_base 21: mod_base = OTHER; note = 2'-deoxy-2'-fluorouridine
atgtaaccaagagtattccat

SEQ ID NO: 142 - RNA, 21 nt, synthetic construct
  source 1..21: mol_type = other RNA
  modified_base 1: mod_base = OTHER; note = 2'-deoxy-2'-fluoroadenosine-3'-phosphate
  modified_base 2: mod_base = OTHER; note = 2'-O-methyluridine-3'-phosphate
  modified_base 3: mod_base = OTHER; note = 2'-deoxy-2'-fluoroguanosine-3'-phosphate
  modified_base 4: mod_base = OTHER; note = 2'-O-methyluridine-3'-phosphate
  modified_base 5: mod_base = OTHER; note = 2'-deoxy-2'-fluoroadenosine-3'-phosphate
  modified_base 6: mod_base = OTHER; note = 2'-deoxy-2'-fluoroadenosine-3'-phosphate
  modified_base 7: mod_base = OTHER; note = 2'-deoxy-2'-fluorocytidine-3'-phosphate
  modified_base 8: mod_base = OTHER; note = 2'-O-methylcytidine-3'-phosphate
  modified_base 9: mod_base = OTHER; note = 2'-deoxy-2'-fluoroadenosine-3'-phosphate
  modified_base 10: mod_base = OTHER; note = 2'-O-methyladenosine-3'-phosphate
  modified_base 11: mod_base = OTHER; note = 2'-deoxy-2'-fluoroguanosine-3'-phosphate
  modified_base 12: mod_base = OTHER; note = 2'-O-methyladenosine-3'-phosphate
  modified_base 13: mod_base = OTHER; note = 2'-deoxy-2'-fluoroguanosine-3'-phosphate
  modified_base 14: mod_base = OTHER; note = 2'-O-methyluridine-3'-phosphate
  modified_base 15: mod_base = OTHER; note = 2'-deoxy-2'-fluoroadenosine-3'-phosphate
  modified_base 16: mod_base = OTHER; note = 2'-O-methyluridine-3'-phosphate
  modified_base 17: mod_base = OTHER; note = 2'-deoxy-2'-fluorouridine-3'-phosphate
  modified_base 18: mod_base = OTHER; note = 2'-O-methylcytidine-3'-phosphate
  modified_base 19: mod_base = OTHER; note = 2'-deoxy-2'-fluorocytidine-3'-phosphate
  modified_base 20: mod_base = OTHER; note = 2'-O-methyladenosine-3'-phosphorothioate
  modified_base 21: mod_base = OTHER; note = 2'-deoxy-2'-fluorouridine
atgtaaccaagagtattccat

SEQ ID NO: 143 - RNA, 21 nt, synthetic construct
  source 1..21: mol_type = other RNA
  modified_base 1: mod_base = OTHER; note = 2'-deoxy-2'-fluoroadenosine-3'-phosphate
  modified_base 2: mod_base = OTHER; note = 2'-O-methyluridine-3'-phosphate
  modified_base 3: mod_base = OTHER; note = 2'-deoxy-2'-fluoroguanosine-3'-phosphate
  modified_base 4: mod_base = OTHER; note = 2'-O-methyluridine-3'-phosphate
  modified_base 5: mod_base = OTHER; note = 2'-deoxy-2'-fluoroadenosine-3'-phosphate
  modified_base 6: mod_base = OTHER; note = 2'-O-methyladenosine-3'-phosphate
  modified_base 7: mod_base = OTHER; note = 2'-deoxy-2'-fluorocytidine-3'-phosphate
  modified_base 8: mod_base = OTHER; note = 2'-O-methylcytidine-3'-phosphate
  modified_base 9: mod_base = OTHER; note = 2'-deoxy-2'-fluoroadenosine-3'-phosphate
  modified_base 10: mod_base = OTHER; note = 2'-O-methyladenosine-3'-phosphate
  modified_base 11: mod_base = OTHER; note = 2'-deoxy-2'-fluoroguanosine-3'-phosphate
  modified_base 12: mod_base = OTHER; note = 2'-O-methyladenosine-3'-phosphate
  modified_base 13: mod_base = OTHER; note = 2'-deoxy-2'-fluoroguanosine-3'-phosphate
  modified_base 14: mod_base = OTHER; note = 2'-O-methyluridine-3'-phosphate
  modified_base 15: mod_base = OTHER; note = 2'-deoxy-2'-fluoroadenosine-3'-phosphate
  modified_base 16: mod_base = OTHER; note = 2'-O-methyluridine-3'-phosphate
  modified_base 17: mod_base = OTHER; note = 2'-deoxy-2'-fluorouridine-3'-phosphate
  modified_base 18: mod_base = OTHER; note = 2'-O-methylcytidine-3'-phosphate
  modified_base 19: mod_base = OTHER; note = 2'-deoxy-2'-fluorocytidine-3'-phosphate
  modified_base 20: mod_base = OTHER; note = 2'-O-methyladenosine-3'-phosphorothioate
  modified_base 21: mod_base = OTHER; note = 2'-deoxy-2'-fluorouridine
atgtaaccaagagtattccat

SEQ ID NO: 144 - RNA, 21 nt, synthetic construct
  source 1..21: mol_type = other RNA
  modified_base 1: mod_base = OTHER; note = 2'-deoxy-2'-fluoroadenosine-3'-phosphate
  modified_base 2: mod_base = OTHER; note = 2'-deoxy-2'-fluorouridine-3'-phosphate
  modified_base 3: mod_base = OTHER; note = 2'-deoxy-2'-fluoroguanosine-3'-phosphate
  modified_base 4: mod_base = OTHER; note = 2'-O-methyluridine-3'-phosphate
  modified_base 5: mod_base = OTHER; note = 2'-deoxy-2'-fluoroadenosine-3'-phosphate
  modified_base 6: mod_base = OTHER; note = 2'-O-methyladenosine-3'-phosphate
  modified_base 7: mod_base = OTHER; note = 2'-deoxy-2'-fluorocytidine-3'-phosphate
  modified_base 8: mod_base = OTHER; note = 2'-O-methylcytidine-3'-phosphate
  modified_base 9: mod_base = OTHER; note = 2'-deoxy-2'-fluoroadenosine-3'-phosphate
  modified_base 10: mod_base = OTHER; note = 2'-O-methyladenosine-3'-phosphate
  modified_base 11: mod_base = OTHER; note = 2'-O-methylguanosine-3'-phosphate
  modified_base 12: mod_base = OTHER; note = 2'-O-methyladenosine-3'-phosphate
  modified_base 13: mod_base = OTHER; note = 2'-deoxy-2'-fluoroguanosine-3'-phosphate
  modified_base 14: mod_base = OTHER; note = 2'-O-methyluridine-3'-phosphate
  modified_base 15: mod_base = OTHER; note = 2'-deoxy-2'-fluoroadenosine-3'-phosphate
  modified_base 16: mod_base = OTHER; note = 2'-O-methyluridine-3'-phosphate
  modified_base 17: mod_base = OTHER; note = 2'-deoxy-2'-fluorouridine-3'-phosphate
  modified_base 18: mod_base = OTHER; note = 2'-O-methylcytidine-3'-phosphate
  modified_base 19: mod_base = OTHER; note = 2'-deoxy-2'-fluorocytidine-3'-phosphate
  modified_base 20: mod_base = OTHER; note = 2'-O-methyladenosine-3'-phosphorothioate
  modified_base 21: mod_base = OTHER; note = 2'-deoxy-2'-fluorouridine
atgtaaccaagagtattccat

SEQ ID NO: 145 - RNA, 21 nt, synthetic construct
  source 1..21: mol_type = other RNA
  modified_base 1: mod_base = OTHER; note = 2'-deoxy-2'-fluoroadenosine-3'-phosphate
  modified_base 2: mod_base = OTHER; note = 2'-O-methyluridine-3'-phosphate
  modified_base 3: mod_base = OTHER; note = 2'-deoxy-2'-fluoroguanosine-3'-phosphate
  modified_base 4: mod_base = OTHER; note = 2'-deoxy-2'-fluorouridine-3'-phosphate
  modified_base 5: mod_base = OTHER; note = 2'-deoxy-2'-fluoroadenosine-3'-phosphate
  modified_base 6: mod_base = OTHER; note = 2'-O-methyladenosine-3'-phosphate
  modified_base 7: mod_base = OTHER; note = 2'-deoxy-2'-fluorocytidine-3'-phosphate
  modified_base 8: mod_base = OTHER; note = 2'-O-methylcytidine-3'-phosphate
  modified_base 9: mod_base = OTHER; note = 2'-deoxy-2'-fluoroadenosine-3'-phosphate
  modified_base 10: mod_base = OTHER; note = 2'-O-methyladenosine-3'-phosphate
  modified_base 11: mod_base = OTHER; note = 2'-O-methylguanosine-3'-phosphate
  modified_base 12: mod_base = OTHER; note = 2'-O-methyladenosine-3'-phosphate
  modified_base 13: mod_base = OTHER; note = 2'-deoxy-2'-fluoroguanosine-3'-phosphate
  modified_base 14: mod_base = OTHER; note = 2'-O-methyluridine-3'-phosphate
  modified_base 15: mod_base = OTHER; note = 2'-deoxy-2'-fluoroadenosine-3'-phosphate
  modified_base 16: mod_base = OTHER; note = 2'-O-methyluridine-3'-phosphate
  modified_base 17: mod_base = OTHER; note = 2'-deoxy-2'-fluorouridine-3'-phosphate
  modified_base 18: mod_base = OTHER; note = 2'-O-methylcytidine-3'-phosphate
  modified_base 19: mod_base = OTHER; note = 2'-deoxy-2'-fluorocytidine-3'-phosphate
  modified_base 20: mod_base = OTHER; note = 2'-O-methyladenosine-3'-phosphorothioate
  modified_base 21: mod_base = OTHER; note = 2'-deoxy-2'-fluorouridine
atgtaaccaagagtattccat

SEQ ID NO: 146 - RNA, 21 nt, synthetic construct
  source 1..21: mol_type = other RNA
  modified_base 1: mod_base = OTHER; note = 2'-deoxy-2'-fluoroadenosine-3'-phosphate
  modified_base 2: mod_base = OTHER; note = 2'-O-methyluridine-3'-phosphate
  modified_base 3: mod_base = OTHER; note = 2'-deoxy-2'-fluoroguanosine-3'-phosphate
  modified_base 4: mod_base = OTHER; note = 2'-O-methyluridine-3'-phosphate
  modified_base 5: mod_base = OTHER; note = 2'-deoxy-2'-fluoroadenosine-3'-phosphate
  modified_base 6: mod_base = OTHER; note = 2'-deoxy-2'-fluoroadenosine-3'-phosphate
  modified_base 7: mod_base = OTHER; note = 2'-deoxy-2'-fluorocytidine-3'-phosphate
  modified_base 8: mod_base = OTHER; note = 2'-O-methylcytidine-3'-phosphate
  modified_base 9: mod_base = OTHER; note = 2'-deoxy-2'-fluoroadenosine-3'-phosphate
  modified_base 10: mod_base = OTHER; note = 2'-O-methyladenosine-3'-phosphate
  modified_base 11: mod_base = OTHER; note = 2'-deoxy-2'-fluoroguanosine-3'-phosphate
  modified_base 12: mod_base = OTHER; note = 2'-O-methyladenosine-3'-phosphate
  modified_base 13: mod_base = OTHER; note = 2'-O-methylguanosine-3'-phosphate
  modified_base 14: mod_base = OTHER; note = 2'-O-methyluridine-3'-phosphate
  modified_base 15: mod_base = OTHER; note = 2'-deoxy-2'-fluoroadenosine-3'-phosphate
  modified_base 16: mod_base = OTHER; note = 2'-O-methyluridine-3'-phosphate
  modified_base 17: mod_base = OTHER; note = 2'-deoxy-2'-fluorouridine-3'-phosphate
  modified_base 18: mod_base = OTHER; note = 2'-O-methylcytidine-3'-phosphate
  modified_base 19: mod_base = OTHER; note = 2'-deoxy-2'-fluorocytidine-3'-phosphate
  modified_base 20: mod_base = OTHER; note = 2'-O-methyladenosine-3'-phosphorothioate
  modified_base 21: mod_base = OTHER; note = 2'-deoxy-2'-fluorouridine
atgtaaccaagagtattccat

SEQ ID NO: 147 - RNA, 21 nt, synthetic construct
  source 1..21: mol_type = other RNA
  modified_base 1: mod_base = OTHER; note = 2'-deoxy-2'-fluoroadenosine-3'-phosphate
  modified_base 2: mod_base = OTHER; note = 2'-O-methyluridine-3'-phosphate
  modified_base 3: mod_base = OTHER; note = 2'-deoxy-2'-fluoroguanosine-3'-phosphate
  modified_base 4: mod_base = OTHER; note = 2'-O-methyluridine-3'-phosphate
  modified_base 5: mod_base = OTHER; note = 2'-deoxy-2'-fluoroadenosine-3'-phosphate
  modified_base 6: mod_base = OTHER; note = 2'-O-methyladenosine-3'-phosphate
  modified_base 7: mod_base = OTHER; note = 2'-deoxy-2'-fluorocytidine-3'-phosphate
  modified_base 8: mod_base = OTHER; note = 2'-deoxy-2'-fluorocytidine-3'-phosphate
  modified_base 9: mod_base = OTHER; note = 2'-deoxy-2'-fluoroadenosine-3'-phosphate
  modified_base 10: mod_base = OTHER; note = 2'-O-methyladenosine-3'-phosphate
  modified_base 11: mod_base = OTHER; note = 2'-deoxy-2'-fluoroguanosine-3'-phosphate
  modified_base 12: mod_base = OTHER; note = 2'-O-methyladenosine-3'-phosphate
  modified_base 13: mod_base = OTHER; note = 2'-deoxy-2'-fluoroguanosine-3'-phosphate
  modified_base 14: mod_base = OTHER; note = 2'-O-methyluridine-3'-phosphate
  modified_base 15: mod_base = OTHER; note = 2'-deoxy-2'-fluoroadenosine-3'-phosphate
  modified_base 16: mod_base = OTHER; note = 2'-O-methyluridine-3'-phosphate
  modified_base 17: mod_base = OTHER; note = 2'-deoxy-2'-fluorouridine-3'-phosphate
  modified_base 18: mod_base = OTHER; note = 2'-O-methylcytidine-3'-phosphate
  modified_base 19: mod_base = OTHER; note = 2'-deoxy-2'-fluorocytidine-3'-phosphate
  modified_base 20: mod_base = OTHER; note = 2'-O-methyladenosine-3'-phosphorothioate
  modified_base 21: mod_base = OTHER; note = 2'-deoxy-2'-fluorouridine
atgtaaccaagagtattccat

SEQ ID NO: 148 - RNA, 21 nt, synthetic construct
  source 1..21: mol_type = other RNA
  modified_base 1: mod_base = OTHER; note = 2'-O-methyladenosine-3'-phosphate
  modified_base 2: mod_base = OTHER; note = 2'-O-methyluridine-3'-phosphate
  modified_base 3: mod_base = OTHER; note = 2'-deoxy-2'-fluoroguanosine-3'-phosphate
  modified_base 4: mod_base = OTHER; note = 2'-O-methyluridine-3'-phosphate
  modified_base 5: mod_base = OTHER; note = 2'-deoxy-2'-fluoroadenosine-3'-phosphate
  modified_base 6: mod_base = OTHER; note = 2'-O-methyladenosine-3'-phosphate
  modified_base 7: mod_base = OTHER; note = 2'-deoxy-2'-fluorocytidine-3'-phosphate
  modified_base 8: mod_base = OTHER; note = 2'-O-methylcytidine-3'-phosphate
  modified_base 9: mod_base = OTHER; note = 2'-deoxy-2'-fluoroadenosine-3'-phosphate
  modified_base 10: mod_base = OTHER; note = 2'-O-methyladenosine-3'-phosphate
  modified_base 11: mod_base = OTHER; note = 2'-deoxy-2'-fluoroguanosine-3'-phosphate
  modified_base 12: mod_base = OTHER; note = 2'-O-methyladenosine-3'-phosphate
  modified_base 13: mod_base = OTHER; note = 2'-deoxy-2'-fluoroguanosine-3'-phosphate
  modified_base 14: mod_base = OTHER; note = 2'-O-methyluridine-3'-phosphate
  modified_base 15: mod_base = OTHER; note = 2'-deoxy-2'-fluoroadenosine-3'-phosphate
  modified_base 16: mod_base = OTHER; note = 2'-O-methyluridine-3'-phosphate
  modified_base 17: mod_base = OTHER; note = 2'-deoxy-2'-fluorouridine-3'-phosphate
  modified_base 18: mod_base = OTHER; note = 2'-O-methylcytidine-3'-phosphate
  modified_base 19: mod_base = OTHER; note = 2'-deoxy-2'-fluorocytidine-3'-phosphate
  modified_base 20: mod_base = OTHER; note = 2'-O-methyladenosine-3'-phosphorothioate
  modified_base 21: mod_base = OTHER; note = 2'-deoxy-2'-fluorouridine
atgtaaccaagagtattccat

SEQ ID NO: 149 - RNA, 21 nt, synthetic construct
  source 1..21: mol_type = other RNA
  modified_base 1: mod_base = OTHER; note = 2'-deoxy-2'-fluoroadenosine-3'-phosphate
  modified_base 2: mod_base = OTHER; note = 2'-deoxy-2'-fluorouridine-3'-phosphate
  modified_base 3: mod_base = OTHER; note = 2'-deoxy-2'-fluoroguanosine-3'-phosphate
  modified_base 4: mod_base = OTHER; note = 2'-O-methyluridine-3'-phosphate
  modified_base 5: mod_base = OTHER; note = 2'-deoxy-2'-fluoroadenosine-3'-phosphate
  modified_base 6: mod_base = OTHER; note = 2'-O-methyladenosine-3'-phosphate
  modified_base 7: mod_base = OTHER; note = 2'-deoxy-2'-fluorocytidine-3'-phosphate
  modified_base 8: mod_base = OTHER; note = 2'-O-methylcytidine-3'-phosphate
  modified_base 9: mod_base = OTHER; note = 2'-O-methyladenosine-3'-phosphate
  modified_base 10: mod_base = OTHER; note = 2'-O-methyladenosine-3'-phosphate
  modified_base 11: mod_base = OTHER; note = 2'-deoxy-2'-fluoroguanosine-3'-phosphate
  modified_base 12: mod_base = OTHER; note = 2'-O-methyladenosine-3'-phosphate
  modified_base 13: mod_base = OTHER; note = 2'-deoxy-2'-fluoroguanosine-3'-phosphate
  modified_base 14: mod_base = OTHER; note = 2'-O-methyluridine-3'-phosphate
  modified_base 15: mod_base = OTHER; note = 2'-deoxy-2'-fluoroadenosine-3'-phosphate
  modified_base 16: mod_base = OTHER; note = 2'-O-methyluridine-3'-phosphate
  modified_base 17: mod_base = OTHER; note = 2'-deoxy-2'-fluorouridine-3'-phosphate
  modified_base 18: mod_base = OTHER; note = 2'-O-methylcytidine-3'-phosphate
  modified_base 19: mod_base = OTHER; note = 2'-deoxy-2'-fluorocytidine-3'-phosphate
  modified_base 20: mod_base = OTHER; note = 2'-O-methyladenosine-3'-phosphorothioate
  modified_base 21: mod_base = OTHER; note = 2'-deoxy-2'-fluorouridine
atgtaaccaagagtattccat

SEQ ID NO: 150 - RNA, 21 nt, synthetic construct
  source 1..21: mol_type = other RNA
  modified_base 1: mod_base = OTHER; note = 2'-deoxy-2'-fluoroadenosine-3'-phosphate
  modified_base 2: mod_base = OTHER; note = 2'-O-methyluridine-3'-phosphate
  modified_base 3: mod_base = OTHER; note = 2'-deoxy-2'-fluoroguanosine-3'-phosphate
  modified_base 4: mod_base = OTHER; note = 2'-deoxy-2'-fluorouridine-3'-phosphate
  modified_base 5: mod_base = OTHER; note = 2'-deoxy-2'-fluoroadenosine-3'-phosphate
  modified_base 6: mod_base = OTHER; note = 2'-O-methyladenosine-3'-phosphate
  modified_base 7: mod_base = OTHER; note = 2'-deoxy-2'-fluorocytidine-3'-phosphate
  modified_base 8: mod_base = OTHER; note = 2'-O-methylcytidine-3'-phosphate
  modified_base 9: mod_base = OTHER; note = 2'-O-methyladenosine-3'-phosphate
  modified_base 10: mod_base = OTHER; note = 2'-O-methyladenosine-3'-phosphate
  modified_base 11: mod_base = OTHER; note = 2'-deoxy-2'-fluoroguanosine-3'-phosphate
  modified_base 12: mod_base = OTHER; note = 2'-O-methyladenosine-3'-phosphate
  modified_base 13: mod_base = OTHER; note = 2'-deoxy-2'-fluoroguanosine-3'-phosphate
  modified_base 14: mod_base = OTHER; note = 2'-O-methyluridine-3'-phosphate
  modified_base 15: mod_base = OTHER; note = 2'-deoxy-2'-fluoroadenosine-3'-phosphate
  modified_base 16: mod_base = OTHER; note = 2'-O-methyluridine-3'-phosphate
  modified_base 17: mod_base = OTHER; note = 2'-deoxy-2'-fluorouridine-3'-phosphate
  modified_base 18: mod_base = OTHER; note = 2'-O-methylcytidine-3'-phosphate
  modified_base 19: mod_base = OTHER; note = 2'-deoxy-2'-fluorocytidine-3'-phosphate
  modified_base 20: mod_base = OTHER; note = 2'-O-methyladenosine-3'-phosphorothioate
  modified_base 21: mod_base = OTHER; note = 2'-deoxy-2'-fluorouridine
atgtaaccaagagtattccat

SEQ ID NO: 151 - RNA, 21 nt, synthetic construct
  source 1..21: mol_type = other RNA
  modified_base 1: mod_base = OTHER; note = 2'-deoxy-2'-fluoroadenosine-3'-phosphate
  modified_base 2: mod_base = OTHER; note = 2'-O-methyluridine-3'-phosphate
  modified_base 3: mod_base = OTHER; note = 2'-O-methylguanosine-3'-phosphate
  modified_base 4: mod_base = OTHER; note = 2'-O-methyluridine-3'-phosphate
  modified_base 5: mod_base = OTHER; note = 2'-deoxy-2'-fluoroadenosine-3'-phosphate
  modified_base 6: mod_base = OTHER; note = 2'-O-methyladenosine-3'-phosphate
  modified_base 7: mod_base = OTHER; note = 2'-deoxy-2'-fluorocytidine-3'-phosphate
  modified_base 8: mod_base = OTHER; note = 2'-O-methylcytidine-3'-phosphate
  modified_base 9: mod_base = OTHER; note = 2'-deoxy-2'-fluoroadenosine-3'-phosphate
  modified_base 10: mod_base = OTHER; note = 2'-O-methyladenosine-3'-phosphate
  modified_base 11: mod_base = OTHER; note = 2'-deoxy-2'-fluoroguanosine-3'-phosphate
  modified_base 12: mod_base = OTHER; note = 2'-O-methyladenosine-3'-phosphate
  modified_base 13: mod_base = OTHER; note = 2'-deoxy-2'-fluoroguanosine-3'-phosphate
  modified_base 14: mod_base = OTHER; note = 2'-O-methyluridine-3'-phosphate
  modified_base 15: mod_base = OTHER; note = 2'-deoxy-2'-fluoroadenosine-3'-phosphate
  modified_base 16: mod_base = OTHER; note = 2'-O-methyluridine-3'-phosphate
  modified_base 17: mod_base = OTHER; note = 2'-deoxy-2'-fluorouridine-3'-phosphate
  modified_base 18: mod_base = OTHER; note = 2'-O-methylcytidine-3'-phosphate
  modified_base 19: mod_base = OTHER; note = 2'-deoxy-2'-fluorocytidine-3'-phosphate
  modified_base 20: mod_base = OTHER; note = 2'-O-methyladenosine-3'-phosphorothioate
  modified_base 21: mod_base = OTHER; note = 2'-deoxy-2'-fluorouridine
atgtaaccaagagtattccat

SEQ ID NO: 152 - RNA, 21 nt, synthetic construct
  source 1..21: mol_type = other RNA
  modified_base 1: mod_base = OTHER; note = 2'-deoxy-2'-fluoroadenosine-3'-phosphate
  modified_base 2: mod_base = OTHER; note = 2'-O-methyluridine-3'-phosphate
  modified_base 3: mod_base = OTHER; note = 2'-deoxy-2'-fluoroguanosine-3'-phosphate
  modified_base 4: mod_base = OTHER; note = 2'-O-methyluridine-3'-phosphate
  modified_base 5: mod_base = OTHER; note = 2'-deoxy-2'-fluoroadenosine-3'-phosphate
  modified_base 6: mod_base = OTHER; note = 2'-O-methyladenosine-3'-phosphate
  modified_base 7: mod_base = OTHER; note = 2'-deoxy-2'-fluorocytidine-3'-phosphate
  modified_base 8: mod_base = OTHER; note = 2'-O-methylcytidine-3'-phosphate
  modified_base 9: mod_base = OTHER; note = 2'-deoxy-2'-fluoroadenosine-3'-phosphate
  modified_base 10: mod_base = OTHER; note = 2'-O-methyladenosine-3'-phosphate
  modified_base 11: mod_base = OTHER; note = 2'-deoxy-2'-fluoroguanosine-3'-phosphate
  modified_base 12: mod_base = OTHER; note = 2'-O-methyladenosine-3'-phosphate
  modified_base 13: mod_base = OTHER; note = 2'-deoxy-2'-fluoroguanosine-3'-phosphate
  modified_base 14: mod_base = OTHER; note = 2'-O-methyluridine-3'-phosphate
  modified_base 15: mod_base = OTHER; note = 2'-deoxy-2'-fluoroadenosine-3'-phosphate
  modified_base 16: mod_base = OTHER; note = 2'-O-methyluridine-3'-phosphate
  modified_base 17: mod_base = OTHER; note = 2'-deoxy-2'-fluorouridine-3'-phosphate
  modified_base 18: mod_base = OTHER; note = 2'-O-methylcytidine-3'-phosphate
  modified_base 19: mod_base = OTHER; note = 2'-O-methylcytidine-3'-phosphate
  modified_base 20: mod_base = OTHER; note = 2'-O-methyladenosine-3'-phosphorothioate
  modified_base 21: mod_base = OTHER; note = 2'-deoxy-2'-fluorouridine
atgtaaccaagagtattccat

SEQ ID NO: 153 - RNA, 21 nt, synthetic construct
  source 1..21: mol_type = other RNA
  modified_base 1: mod_base = OTHER; note = 2'-deoxy-2'-fluoroadenosine-3'-phosphate
  modified_base 2: mod_base = OTHER; note = 2'-deoxy-2'-fluorouridine-3'-phosphate
  modified_base 3: mod_base = OTHER; note = 2'-deoxy-2'-fluoroguanosine-3'-phosphate
  modified_base 4: mod_base = OTHER; note = 2'-O-methyluridine-3'-phosphate
  modified_base 5: mod_base = OTHER; note = 2'-deoxy-2'-fluoroadenosine-3'-phosphate
  modified_base 6: mod_base = OTHER; note = 2'-O-methyladenosine-3'-phosphate
  modified_base 7: mod_base = OTHER; note = 2'-O-methylcytidine-3'-phosphate
  modified_base 8: mod_base = OTHER; note = 2'-O-methylcytidine-3'-phosphate
  modified_base 9: mod_base = OTHER; note = 2'-deoxy-2'-fluoroadenosine-3'-phosphate
  modified_base 10: mod_base = OTHER; note = 2'-O-methyladenosine-3'-phosphate
  modified_base 11: mod_base = OTHER; note = 2'-deoxy-2'-fluoroguanosine-3'-phosphate
  modified_base 12: mod_base = OTHER; note = 2'-O-methyladenosine-3'-phosphate
  modified_base 13: mod_base = OTHER; note = 2'-deoxy-2'-fluoroguanosine-3'-phosphate
  modified_base 14: mod_base = OTHER; note = 2'-O-methyluridine-3'-phosphate
  modified_base 15: mod_base = OTHER; note = 2'-deoxy-2'-fluoroadenosine-3'-phosphate
  modified_base 16: mod_base = OTHER; note = 2'-O-methyluridine-3'-phosphate
  modified_base 17: mod_base = OTHER; note = 2'-deoxy-2'-fluorouridine-3'-phosphate
  modified_base 18: mod_base = OTHER; note = 2'-O-methylcytidine-3'-phosphate
  modified_base 19: mod_base = OTHER; note = 2'-deoxy-2'-fluorocytidine-3'-phosphate
  modified_base 20: mod_base = OTHER; note = 2'-O-methyladenosine-3'-phosphorothioate
  modified_base 21: mod_base = OTHER; note = 2'-deoxy-2'-fluorouridine
atgtaaccaagagtattccat

SEQ ID NO: 154 - RNA, 21 nt, synthetic construct
  source 1..21: mol_type = other RNA
  modified_base 1: mod_base = OTHER; note = 2'-deoxy-2'-fluoroadenosine-3'-phosphate
  modified_base 2: mod_base = OTHER; note = 2'-O-methyluridine-3'-phosphate
  modified_base 3: mod_base = OTHER; note = 2'-deoxy-2'-fluoroguanosine-3'-phosphate
  modified_base 4: mod_base = OTHER; note = 2'-O-methyluridine-3'-phosphate
  modified_base 5: mod_base = OTHER; note = 2'-deoxy-2'-fluoroadenosine-3'-phosphate
  modified_base 6: mod_base = OTHER; note = 2'-deoxy-2'-fluoroadenosine-3'-phosphate
  modified_base 7: mod_base = OTHER; note = 2'-deoxy-2'-fluorocytidine-3'-phosphate
  modified_base 8: mod_base = OTHER; note = 2'-O-methylcytidine-3'-phosphate
  modified_base 9: mod_base = OTHER; note = 2'-deoxy-2'-fluoroadenosine-3'-phosphate
  modified_base 10: mod_base = OTHER; note = 2'-O-methyladenosine-3'-phosphate
  modified_base 11: mod_base = OTHER; note = 2'-deoxy-2'-fluoroguanosine-3'-phosphate
  modified_base 12: mod_base = OTHER; note = 2'-O-methyladenosine-3'-phosphate
  modified_base 13: mod_base = OTHER; note = 2'-deoxy-2'-fluoroguanosine-3'-phosphate
  modified_base 14: mod_base = OTHER; note = 2'-O-methyluridine-3'-phosphate
  modified_base 15: mod_base = OTHER; note = 2'-deoxy-2'-fluoroadenosine-3'-phosphate
  modified_base 16: mod_base = OTHER; note = 2'-O-methyluridine-3'-phosphate
  modified_base 17: mod_base = OTHER; note = 2'-O-methyluridine-3'-phosphate
  modified_base 18: mod_base = OTHER; note = 2'-O-methylcytidine-3'-phosphate
  modified_base 19: mod_base = OTHER; note = 2'-deoxy-2'-fluorocytidine-3'-phosphate
  modified_base 20: mod_base = OTHER; note = 2'-O-methyladenosine-3'-phosphorothioate
  modified_base 21: mod_base = OTHER; note = 2'-deoxy-2'-fluorouridine
atgtaaccaagagtattccat

SEQ ID NO: 155 - RNA, 21 nt, synthetic construct
  source 1..21: mol_type = other RNA
  modified_base 1: mod_base = OTHER; note = 2'-deoxy-2'-fluoroadenosine-3'-phosphate
  modified_base 2: mod_base = OTHER; note = 2'-O-methyluridine-3'-phosphate
  modified_base 3: mod_base = OTHER; note = 2'-deoxy-2'-fluoroguanosine-3'-phosphate
  modified_base 4: mod_base = OTHER; note = 2'-O-methyluridine-3'-phosphate
  modified_base 5: mod_base = OTHER; note = 2'-O-methyladenosine-3'-phosphate
  modified_base 6: mod_base = OTHER; note = 2'-O-methyladenosine-3'-phosphate
  modified_base 7: mod_base = OTHER; note = 2'-deoxy-2'-fluorocytidine-3'-phosphate
  modified_base 8: mod_base = OTHER; note = 2'-O-methylcytidine-3'-phosphate
  modified_base 9: mod_base = OTHER; note = 2'-deoxy-2'-fluoroadenosine-3'-phosphate
  modified_base 10: mod_base = OTHER; note = 2'-O-methyladenosine-3'-phosphate
  modified_base 11: mod_base = OTHER; note = 2'-deoxy-2'-fluoroguanosine-3'-phosphate
  modified_base 12: mod_base = OTHER; note = 2'-O-methyladenosine-3'-phosphate
  modified_base 13: mod_base = OTHER; note = 2'-deoxy-2'-fluoroguanosine-3'-phosphate
  modified_base 14: mod_base = OTHER; note = 2'-O-methyluridine-3'-phosphate
  modified_base 15: mod_base = OTHER; note = 2'-deoxy-2'-fluoroadenosine-3'-phosphate
  modified_base 16: mod_base = OTHER; note = 2'-O-methyluridine-3'-phosphate
  modified_base 17: mod_base = OTHER; note = 2'-deoxy-2'-fluorouridine-3'-phosphate
  modified_base 18: mod_base = OTHER; note = 2'-O-methylcytidine-3'-phosphate
  modified_base 19: mod_base = OTHER; note = 2'-deoxy-2'-fluorocytidine-3'-phosphate
  modified_base 20: mod_base = OTHER; note = 2'-O-methyladenosine-3'-phosphorothioate
  modified_base 21: mod_base = OTHER; note = 2'-deoxy-2'-fluorouridine
atgtaaccaagagtattccat

SEQ ID NO: 156 - RNA, 21 nt, synthetic construct
  source 1..21: mol_type = other RNA
  modified_base 1: mod_base = OTHER; note = 2'-deoxy-2'-fluoroadenosine-3'-phosphate
  modified_base 2: mod_base = OTHER; note = 2'-deoxy-2'-fluorouridine-3'-phosphate
  modified_base 3: mod_base = OTHER; note = 2'-deoxy-2'-fluoroguanosine-3'-phosphate
  modified_base 4: mod_base = OTHER; note = 2'-O-methyluridine-3'-phosphate
  modified_base 5: mod_base = OTHER; note = 2'-O-methyladenosine-3'-phosphate
  modified_base 6: mod_base = OTHER; note = 2'-O-methyladenosine-3'-phosphate
  modified_base 7: mod_base = OTHER; note = 2'-deoxy-2'-fluorocytidine-3'-phosphate
  modified_base 8: mod_base = OTHER; note = 2'-O-methylcytidine-3'-phosphate
  modified_base 9: mod_base = OTHER; note = 2'-deoxy-2'-fluoroadenosine-3'-phosphate
  modified_base 10: mod_base = OTHER; note = 2'-O-methyladenosine-3'-phosphate
  modified_base 11: mod_base = OTHER; note = 2'-deoxy-2'-fluoroguanosine-3'-phosphate
  modified_base 12: mod_base = OTHER; note = 2'-O-methyladenosine-3'-phosphate
  modified_base 13: mod_base = OTHER; note = 2'-deoxy-2'-fluoroguanosine-3'-phosphate
  modified_base 14: mod_base = OTHER; note = 2'-O-methyluridine-3'-phosphate
  modified_base 15: mod_base = OTHER; note = 2'-deoxy-2'-fluoroadenosine-3'-phosphate
  modified_base 16: mod_base = OTHER; note = 2'-O-methyluridine-3'-phosphate
  modified_base 17: mod_base = OTHER; note = 2'-deoxy-2'-fluorouridine-3'-phosphate
  modified_base 18: mod_base = OTHER; note = 2'-O-methylcytidine-3'-phosphate
  modified_base 19: mod_base = OTHER; note = 2'-deoxy-2'-fluorocytidine-3'-phosphate
  modified_base 20: mod_base = OTHER; note = 2'-O-methyladenosine-3'-phosphorothioate
  modified_base 21: mod_base = OTHER; note = 2'-deoxy-2'-fluorouridine
atgtaaccaagagtattccat

SEQ ID NO: 157 - RNA, 21 nt, synthetic construct
  source 1..21: mol_type = other RNA
  modified_base 1: mod_base = OTHER; note = 2'-O-methyladenosine-3'-phosphate
  modified_base 2: mod_base = OTHER; note = 2'-O-methyluridine-3'-phosphate
  modified_base 3: mod_base = OTHER; note = 2'-deoxy-2'-fluoroguanosine-3'-phosphate
  modified_base 4: mod_base = OTHER; note = 2'-deoxy-2'-fluorouridine-3'-phosphate
  modified_base 5: mod_base = OTHER; note = 2'-deoxy-2'-fluoroadenosine-3'-phosphate
  modified_base 6: mod_base = OTHER; note = 2'-O-methyladenosine-3'-phosphate
  modified_base 7: mod_base = OTHER; note = 2'-deoxy-2'-fluorocytidine-3'-phosphate
  modified_base 8: mod_base = OTHER; note = 2'-O-methylcytidine-3'-phosphate
  modified_base 9: mod_base = OTHER; note = 2'-deoxy-2'-fluoroadenosine-3'-phosphate
  modified_base 10: mod_base = OTHER; note = 2'-O-methyladenosine-3'-phosphate
  modified_base 11: mod_base = OTHER; note = 2'-deoxy-2'-fluoroguanosine-3'-phosphate
  modified_base 12: mod_base = OTHER; note = 2'-O-methyladenosine-3'-phosphate
  modified_base 13: mod_base = OTHER; note = 2'-deoxy-2'-fluoroguanosine-3'-phosphate
  modified_base 14: mod_base = OTHER; note = 2'-O-methyluridine-3'-phosphate
  modified_base 15: mod_base = OTHER; note = 2'-deoxy-2'-fluoroadenosine-3'-phosphate
  modified_base 16: mod_base = OTHER; note = 2'-O-methyluridine-3'-phosphate
  modified_base 17: mod_base = OTHER; note = 2'-deoxy-2'-fluorouridine-3'-phosphate
  modified_base 18: mod_base = OTHER; note = 2'-O-methylcytidine-3'-phosphate
  modified_base 19: mod_base = OTHER; note = 2'-deoxy-2'-fluorocytidine-3'-phosphate
  modified_base 20: mod_base = OTHER; note = 2'-O-methyladenosine-3'-phosphorothioate
  modified_base 21: mod_base = OTHER; note = 2'-deoxy-2'-fluorouridine
atgtaaccaagagtattccat

SEQ ID NO: 158 - RNA, 21 nt, synthetic construct
  source 1..21: mol_type = other RNA
  modified_base 1: mod_base = OTHER; note = 2'-deoxy-2'-fluoroadenosine-3'-phosphate
  modified_base 2: mod_base = OTHER; note = 2'-O-methyluridine-3'-phosphate
  modified_base 3: mod_base = OTHER; note = 2'-deoxy-2'-fluoroguanosine-3'-phosphate
  modified_base 4: mod_base = OTHER; note = 2'-O-methyluridine-3'-phosphate
  modified_base 5: mod_base = OTHER; note = 2'-deoxy-2'-fluoroadenosine-3'-phosphate
  modified_base 6: mod_base = OTHER; note = 2'-deoxy-2'-fluoroadenosine-3'-phosphate
  modified_base 7: mod_base = OTHER; note = 2'-deoxy-2'-fluorocytidine-3'-phosphate
  modified_base 8: mod_base = OTHER; note = 2'-O-methylcytidine-3'-phosphate
  modified_base 9: mod_base = OTHER; note = 2'-deoxy-2'-fluoroadenosine-3'-phosphate
  modified_base 10: mod_base = OTHER; note = 2'-O-methyladenosine-3'-phosphate
  modified_base 11: mod_base = OTHER; note = 2'-deoxy-2'-fluoroguanosine-3'-phosphate
  modified_base 12: mod_base = OTHER; note = 2'-O-methyladenosine-3'-phosphate
  modified_base 13: mod_base = OTHER; note = 2'-deoxy-2'-fluoroguanosine-3'-phosphate
  modified_base 14: mod_base = OTHER; note = 2'-O-methyluridine-3'-phosphate
  modified_base 15: mod_base = OTHER; note = 2'-deoxy-2'-fluoroadenosine-3'-phosphate
  modified_base 16: mod_base = OTHER; note = 2'-O-methyluridine-3'-phosphate
  modified_base 17: mod_base = OTHER; note = 2'-deoxy-2'-fluorouridine-3'-phosphate
  modified_base 18: mod_base = OTHER; note = 2'-O-methylcytidine-3'-phosphate
  modified_base 19: mod_base = OTHER; note = 2'-O-methylcytidine-3'-phosphate
  modified_base 20: mod_base = OTHER; note = 2'-O-methyladenosine-3'-phosphorothioate
  modified_base 21: mod_base = OTHER; note = 2'-deoxy-2'-fluorouridine
atgtaaccaagagtattccat

SEQ ID NO: 159 - RNA, 21 nt, synthetic construct
  source 1..21: mol_type = other RNA
  modified_base 1: mod_base = OTHER; note = 2'-deoxy-2'-fluorouridine-3'-phosphate
  modified_base 2: mod_base = OTHER; note = 2'-O-methylguanosine-3'-phosphate
  modified_base 3: mod_base = OTHER; note = 2'-deoxy-2'-fluoroguanosine-3'-phosphate
  modified_base 4: mod_base = OTHER; note = 2'-O-methylguanosine-3'-phosphate
  modified_base 5: mod_base = OTHER; note = 2'-deoxy-2'-fluoroadenosine-3'-phosphate
  modified_base 6: mod_base = OTHER; note = 2'-O-methyluridine-3'-phosphate
  modified_base 7: mod_base = OTHER; note = 2'-deoxy-2'-fluorouridine-3'-phosphate
  modified_base 8: mod_base = OTHER; note = 2'-O-methyluridine-3'-phosphate
  modified_base 9: mod_base = OTHER; note = 2'-deoxy-2'-fluorocytidine-3'-phosphate
  modified_base 10: mod_base = OTHER; note = 2'-O-methyladenosine-3'-phosphate
  modified_base 11: mod_base = OTHER; note = 2'-deoxy-2'-fluorouridine-3'-phosphate
  modified_base 12: mod_base = OTHER; note = 2'-O-methylguanosine-3'-phosphate
  modified_base 13: mod_base = OTHER; note = 2'-deoxy-2'-fluorouridine-3'-phosphate
  modified_base 14: mod_base = OTHER; note = 2'-O-methyladenosine-3'-phosphate
  modified_base 15: mod_base = OTHER; note = 2'-deoxy-2'-fluoroadenosine-3'-phosphate
  modified_base 16: mod_base = OTHER; note = 2'-O-methylcytidine-3'-phosphate
  modified_base 17: mod_base = OTHER; note = 2'-deoxy-2'-fluorocytidine-3'-phosphate
  modified_base 18: mod_base = OTHER; note = 2'-O-methyladenosine-3'-phosphate
  modified_base 19: mod_base = OTHER; note = 2'-deoxy-2'-fluoroadenosine-3'-phosphate
  modified_base 20: mod_base = OTHER; note = 2'-O-methylguanosine-3'-phosphorothioate
  modified_base 21: mod_base = OTHER; note = 2'-deoxy-2'-fluoroadenosine
tgggatttcatgtaaccaaga

SEQ ID NO: 160 - RNA, 21 nt, synthetic construct
  source 1..21: mol_type = other RNA
  modified_base 1: mod_base = OTHER; note = 2'-deoxy-2'-fluorouridine-3'-phosphate
  modified_base 2: mod_base = OTHER; note = 2'-O-methylguanosine-3'-phosphate
  modified_base 3: mod_base = OTHER; note = 2'-deoxy-2'-fluoroguanosine-3'-phosphate
  modified_base 4: mod_base = OTHER; note = 2'-deoxy-2'-fluoroguanosine-3'-phosphate
  modified_base 5: mod_base = OTHER; note = 2'-deoxy-2'-fluoroadenosine-3'-phosphate
  modified_base 6: mod_base = OTHER; note = 2'-O-methyluridine-3'-phosphate
  modified_base 7: mod_base = OTHER; note = 2'-O-methyluridine-3'-phosphate
  modified_base 8: mod_base = OTHER; note = 2'-O-methyluridine-3'-phosphate
  modified_base 9: mod_base = OTHER; note = 2'-deoxy-2'-fluorocytidine-3'-phosphate
  modified_base 10: mod_base = OTHER; note = 2'-O-methyladenosine-3'-phosphate
  modified_base 11: mod_base = OTHER; note = 2'-deoxy-2'-fluorouridine-3'-phosphate
  modified_base 12: mod_base = OTHER; note = 2'-O-methylguanosine-3'-phosphate
  modified_base 13: mod_base = OTHER; note = 2'-deoxy-2'-fluorouridine-3'-phosphate
  modified_base 14: mod_base = OTHER; note = 2'-deoxy-2'-fluoroadenosine-3'-phosphate
  modified_base 15: mod_base = OTHER; note = 2'-deoxy-2'-fluoroadenosine-3'-phosphate
  modified_base 16: mod_base = OTHER; note = 2'-O-methylcytidine-3'-phosphate
  modified_base 17: mod_base = OTHER; note = 2'-deoxy-2'-fluorocytidine-3'-phosphate
  modified_base 18: mod_base = OTHER; note = 2'-O-methyladenosine-3'-phosphate
  modified_base 19: mod_base = OTHER; note = 2'-deoxy-2'-fluoroadenosine-3'-phosphate
  modified_base 20: mod_base = OTHER; note = 2'-O-methylguanosine-3'-phosphorothioate
  modified_base 21: mod_base = OTHER; note = 2'-deoxy-2'-fluoroadenosine
tgggatttcatgtaaccaaga

SEQ ID NO: 161 - RNA, 21 nt, synthetic construct
  source 1..21: mol_type = other RNA
  modified_base 1: mod_base = OTHER; note = 2'-deoxy-2'-fluorouridine-3'-phosphate
  modified_base 2: mod_base = OTHER; note = 2'-O-methylguanosine-3'-phosphate
  modified_base 3: mod_base = OTHER; note = 2'-deoxy-2'-fluoroguanosine-3'-phosphate
  modified_base 4: mod_base = OTHER; note = 2'-O-methylguanosine-3'-phosphate
  modified_base 5: mod_base = OTHER; note = 2'-deoxy-2'-fluoroadenosine-3'-phosphate
  modified_base 6: mod_base = OTHER; note = 2'-O-methyluridine-3'-phosphate
  modified_base 7: mod_base = OTHER; note = 2'-O-methyluridine-3'-phosphate
  modified_base 8: mod_base = OTHER; note = 2'-O-methyluridine-3'-phosphate
  modified_base 9: mod_base = OTHER; note = 2'-deoxy-2'-fluorocytidine-3'-phosphate
  modified_base 10: mod_base = OTHER; note = 2'-O-methyladenosine-3'-phosphate
  modified_base 11: mod_base = OTHER; note = 2'-deoxy-2'-fluorouridine-3'-phosphate
  modified_base 12: mod_base = OTHER; note = 2'-deoxy-2'-fluoroguanosine-3'-phosphate
  modified_base 13: mod_base = OTHER; note = 2'-deoxy-2'-fluorouridine-3'-phosphate
  modified_base 14: mod_base = OTHER; note = 2'-O-methyladenosine-3'-phosphate
  modified_base 15: mod_base = OTHER; note = 2'-deoxy-2'-fluoroadenosine-3'-phosphate
  modified_base 16: mod_base = OTHER; note = 2'-O-methylcytidine-3'-phosphate
  modified_base 17: mod_base = OTHER; note = 2'-deoxy-2'-fluorocytidine-3'-phosphate
  modified_base 18: mod_base = OTHER; note = 2'-O-methyladenosine-3'-phosphate
  modified_base 19: mod_base = OTHER; note = 2'-deoxy-2'-fluoroadenosine-3'-phosphate
  modified_base 20: mod_base = OTHER; note = 2'-O-methylguanosine-3'-phosphorothioate
  modified_base 21: mod_base = OTHER; note = 2'-deoxy-2'-fluoroadenosine
tgggatttcatgtaaccaaga

SEQ ID NO: 162 - RNA, 21 nt, synthetic construct
  source 1..21: mol_type = other RNA
  modified_base 1: mod_base = OTHER; note = 2'-deoxy-2'-fluorouridine-3'-phosphate
  modified_base 2: mod_base = OTHER; note = 2'-O-methylguanosine-3'-phosphate
  modified_base 3: mod_base = OTHER; note = 2'-deoxy-2'-fluoroguanosine-3'-phosphate
  modified_base 4: mod_base = OTHER; note = 2'-O-methylguanosine-3'-phosphate
  modified_base 5: mod_base = OTHER; note = 2'-deoxy-2'-fluoroadenosine-3'-phosphate
  modified_base 6: mod_base = OTHER; note = 2'-O-methyluridine-3'-phosphate
  modified_base 7: mod_base = OTHER; note = 2'-deoxy-2'-fluorouridine-3'-phosphate
  modified_base 8: mod_base = OTHER; note = 2'-O-methyluridine-3'-phosphate
  modified_base 9: mod_base = OTHER; note = 2'-deoxy-2'-fluorocytidine-3'-phosphate
  modified_base 10: mod_base = OTHER; note = 2'-O-methyladenosine-3'-phosphate
  modified_base 11: mod_base = OTHER; note = 2'-deoxy-2'-fluorouridine-3'-phosphate
  modified_base 12: mod_base = OTHER; note = 2'-O-methylguanosine-3'-phosphate
  modified_base 13: mod_base = OTHER; note = 2'-deoxy-2'-fluorouridine-3'-phosphate
  modified_base 14: mod_base = OTHER; note = 2'-deoxy-2'-fluoroadenosine-3'-phosphate
  modified_base 15: mod_base = OTHER; note = 2'-deoxy-2'-fluoroadenosine-3'-phosphate
  modified_base 16: mod_base = OTHER; note = 2'-O-methylcytidine-3'-phosphate
  modified_base 17: mod_base = OTHER; note = 2'-deoxy-2'-fluorocytidine-3'-phosphate
  modified_base 18: mod_base = OTHER; note = 2'-O-methyladenosine-3'-phosphate
  modified_base 19: mod_base = OTHER; note = 2'-deoxy-2'-fluoroadenosine-3'-phosphate
  modified_base 20: mod_base = OTHER; note = 2'-O-methylguanosine-3'-phosphorothioate
  modified_base 21: mod_base = OTHER; note = 2'-deoxy-2'-fluoroadenosine
tgggatttcatgtaaccaaga

SEQ ID NO: 163 - RNA, 21 nt, synthetic construct
  source 1..21: mol_type = other RNA
  modified_base 1: mod_base = OTHER; note = 2'-deoxy-2'-fluorouridine-3'-phosphate
  modified_base 2: mod_base = OTHER; note = 2'-O-methylguanosine-3'-phosphate
  modified_base 3: mod_base = OTHER; note = 2'-deoxy-2'-fluoroguanosine-3'-phosphate
  modified_base 4: mod_base = OTHER; note = 2'-O-methylguanosine-3'-phosphate
  modified_base 5: mod_base = OTHER; note = 2'-deoxy-2'-fluoroadenosine-3'-phosphate
  modified_base 6: mod_base = OTHER; note = 2'-O-methyluridine-3'-phosphate
  modified_base 7: mod_base = OTHER; note = 2'-O-methyluridine-3'-phosphate
  modified_base 8: mod_base = OTHER; note = 2'-O-methyluridine-3'-phosphate
  modified_base 9: mod_base = OTHER; note = 2'-deoxy-2'-fluorocytidine-3'-phosphate
  modified_base 10: mod_base = OTHER; note = 2'-O-methyladenosine-3'-phosphate
  modified_base 11: mod_base = OTHER; note = 2'-deoxy-2'-fluorouridine-3'-phosphate
  modified_base 12: mod_base = OTHER; note = 2'-O-methylguanosine-3'-phosphate
  modified_base 13: mod_base = OTHER; note = 2'-deoxy-2'-fluorouridine-3'-phosphate
  modified_base 14: mod_base = OTHER; note = 2'-deoxy-2'-fluoroadenosine-3'-phosphate
  modified_base 15: mod_base = OTHER; note = 2'-deoxy-2'-fluoroadenosine-3'-phosphate
  modified_base 16: mod_base = OTHER; note = 2'-O-methylcytidine-3'-phosphate
  modified_base 17: mod_base = OTHER; note = 2'-deoxy-2'-fluorocytidine-3'-phosphate
  modified_base 18: mod_base = OTHER; note = 2'-O-methyladenosine-3'-phosphate
  modified_base 19: mod_base = OTHER; note = 2'-deoxy-2'-fluoroadenosine-3'-phosphate
  modified_base 20: mod_base = OTHER; note = 2'-O-methylguanosine-3'-phosphorothioate
  modified_base 21: mod_base = OTHER; note = 2'-deoxy-2'-fluoroadenosine
tgggatttcatgtaaccaaga

SEQ ID NO: 164 - RNA, 21 nt, synthetic construct
  source 1..21: mol_type = other RNA
  modified_base 1: mod_base = OTHER; note = 2'-deoxy-2'-fluorouridine-3'-phosphate
  modified_base 2: mod_base = OTHER; note = 2'-deoxy-2'-fluoroguanosine-3'-phosphate
  modified_base 3: mod_base = OTHER; note = 2'-O-methylguanosine-3'-phosphate
  modified_base 4: mod_base = OTHER; note = 2'-O-methylguanosine-3'-phosphate
  modified_base 5: mod_base = OTHER; note = 2'-deoxy-2'-fluoroadenosine-3'-phosphate
  modified_base 6: mod_base = OTHER; note = 2'-deoxy-2'-fluorouridine-3'-phosphate
  modified_base 7: mod_base = OTHER; note = 2'-O-methyluridine-3'-phosphate
  modified_base 8: mod_base = OTHER; note = 2'-deoxy-2'-fluorouridine-3'-phosphate
  modified_base 9: mod_base = OTHER; note = 2'-O-methylcytidine-3'-phosphate
  modified_base 10: mod_base = OTHER; note = 2'-deoxy-2'-fluoroadenosine-3'-phosphate
  modified_base 11: mod_base = OTHER; note = 2'-O-methyluridine-3'-phosphate
  modified_base 12: mod_base = OTHER; note = 2'-deoxy-2'-fluoroguanosine-3'-phosphate
  modified_base 13: mod_base = OTHER; note = 2'-O-methyluridine-3'-phosphate
  modified_base 14: mod_base = OTHER; note = 2'-deoxy-2'-fluoroadenosine-3'-phosphate
  modified_base 15: mod_base = OTHER; note = 2'-deoxy-2'-fluoroadenosine-3'-phosphate
  modified_base 16: mod_base = OTHER; note = 2'-O-methylcytidine-3'-phosphate
  modified_base 17: mod_base = OTHER; note = 2'-O-methylcytidine-3'-phosphate
  modified_base 18: mod_base = OTHER; note = 2'-deoxy-2'-fluoroadenosine-3'-phosphate
  modified_base 19: mod_base = OTHER; note = 2'-deoxy-2'-fluoroadenosine-3'-phosphate
  modified_base 20: mod_base = OTHER; note = 2'-O-methylguanosine-3'-phosphorothioate
  modified_base 21: mod_base = OTHER; note = 2'-deoxy-2'-fluoroadenosine
tgggatttcatgtaaccaaga

SEQ ID NO: 165 - RNA, 21 nt, synthetic construct
  source 1..21: mol_type = other RNA
  modified_base 1: mod_base = OTHER; note = 2'-deoxy-2'-fluorouridine-3'-phosphate
  modified_base 2: mod_base = OTHER; note = 2'-deoxy-2'-fluoroguanosine-3'-phosphate
  modified_base 3: mod_base = OTHER; note = 2'-O-methylguanosine-3'-phosphate
  modified_base 4: mod_base = OTHER; note = 2'-O-methylguanosine-3'-phosphate
  modified_base 5: mod_base = OTHER; note = 2'-deoxy-2'-fluoroadenosine-3'-phosphate
  modified_base 6: mod_base = OTHER; note = 2'-deoxy-2'-fluorouridine-3'-phosphate
  modified_base 7: mod_base = OTHER; note = 2'-O-methyluridine-3'-phosphate
  modified_base 8: mod_base = OTHER; note = 2'-O-methyluridine-3'-phosphate
  modified_base 9: mod_base = OTHER; note = 2'-deoxy-2'-fluorocytidine-3'-phosphate
  modified_base 10: mod_base = OTHER; note = 2'-O-methyladenosine-3'-phosphate
  modified_base 11: mod_base = OTHER; note = 2'-deoxy-2'-fluorouridine-3'-phosphate
  modified_base 12: mod_base = OTHER; note = 2'-O-methylguanosine-3'-phosphate
  modified_base 13: mod_base = OTHER; note = 2'-deoxy-2'-fluorouridine-3'-phosphate
  modified_base 14: mod_base = OTHER; note = 2'-deoxy-2'-fluoroadenosine-3'-phosphate
  modified_base 15: mod_base = OTHER; note = 2'-deoxy-2'-fluoroadenosine-3'-phosphate
  modified_base 16: mod_base = OTHER; note = 2'-O-methylcytidine-3'-phosphate
  modified_base 17: mod_base = OTHER; note = 2'-deoxy-2'-fluorocytidine-3'-phosphate
  modified_base 18: mod_base = OTHER; note = 2'-O-methyladenosine-3'-phosphate
  modified_base 19: mod_base = OTHER; note = 2'-deoxy-2'-fluoroadenosine-3'-phosphate
  modified_base 20: mod_base = OTHER; note = 2'-O-methylguanosine-3'-phosphorothioate
  modified_base 21: mod_base = OTHER; note = 2'-deoxy-2'-fluoroadenosine
tgggatttcatgtaaccaaga

SEQ ID NO: 166 - RNA, 21 nt, synthetic construct
  source 1..21: mol_type = other RNA
  modified_base 1: mod_base = OTHER; note = 2'-deoxy-2'-fluorouridine-3'-phosphate
  modified_base 2: mod_base = OTHER; note = 2'-O-methylguanosine-3'-phosphate
  modified_base 3: mod_base = OTHER; note = 2'-deoxy-2'-fluoroguanosine-3'-phosphate
  modified_base 4: mod_base = OTHER; note = 2'-O-methylguanosine-3'-phosphate
  modified_base 5: mod_base = OTHER; note = 2'-deoxy-2'-fluoroadenosine-3'-phosphate
  modified_base 6: mod_base = OTHER; note = 2'-O-methyluridine-3'-phosphate
  modified_base 7: mod_base = OTHER; note = 2'-deoxy-2'-fluorouridine-3'-phosphate
  modified_base 8: mod_base = OTHER; note = 2'-O-methyluridine-3'-phosphate
  modified_base 9: mod_base = OTHER; note = 2'-O-methylcytidine-3'-phosphate
  modified_base 10: mod_base = OTHER; note = 2'-O-methyladenosine-3'-phosphate
  modified_base 11: mod_base = OTHER; note = 2'-deoxy-2'-fluorouridine-3'-phosphate
  modified_base 12: mod_base = OTHER; note = 2'-deoxy-2'-fluoroguanosine-3'-phosphate
  modified_base 13: mod_base = OTHER; note = 2'-deoxy-2'-fluorouridine-3'-phosphate
  modified_base 14: mod_base = OTHER; note = 2'-O-methyladenosine-3'-phosphate
  modified_base 15: mod_base = OTHER; note = 2'-deoxy-2'-fluoroadenosine-3'-phosphate
  modified_base 16: mod_base = OTHER; note = 2'-O-methylcytidine-3'-phosphate
  modified_base 17: mod_base = OTHER; note = 2'-deoxy-2'-fluorocytidine-3'-phosphate
  modified_base 18: mod_base = OTHER; note = 2'-O-methyladenosine-3'-phosphate
  modified_base 19: mod_base = OTHER; note = 2'-deoxy-2'-fluoroadenosine-3'-phosphate
  modified_base 20: mod_base = OTHER; note = 2'-O-methylguanosine-3'-phosphorothioate
  modified_base 21: mod_base = OTHER; note = 2'-deoxy-2'-fluoroadenosine
tgggatttcatgtaaccaaga

SEQ ID NO: 167 - RNA, 21 nt, synthetic construct
  source 1..21: mol_type = other RNA
  modified_base 1: mod_base = OTHER; note = 2'-deoxy-2'-fluoroadenosine-3'-phosphate
  modified_base 2: mod_base = OTHER; note = 2'-O-methyluridine-3'-phosphate
  modified_base 3: mod_base = OTHER; note = 2'-deoxy-2'-fluoroguanosine-3'-phosphate
  modified_base 4: mod_base = OTHER; note = 2'-O-methyluridine-3'-phosphate
  modified_base 5: mod_base = OTHER; note = 2'-deoxy-2'-fluoroadenosine-3'-phosphate
  modified_base 6: mod_base = OTHER; note = 2'-O-methyladenosine-3'-phosphate
  modified_base 7: mod_base = OTHER; note = 2'-deoxy-2'-fluorocytidine-3'-phosphate
  modified_base 8: mod_base = OTHER; note = 2'-O-methylcytidine-3'-phosphate
  modified_base 9: mod_base = OTHER; note = 2'-O-methyladenosine-3'-phosphate
  modified_base 10: mod_base = OTHER; note = 2'-O-methyladenosine-3'-phosphate
  modified_base 11: mod_base = OTHER; note = 2'-deoxy-2'-fluoroguanosine-3'-phosphate
  modified_base 12: mod_base = OTHER; note = 2'-O-methyladenosine-3'-phosphate
  modified_base 13: mod_base = OTHER; note = 2'-deoxy-2'-fluoroguanosine-3'-phosphate
  modified_base 14: mod_base = OTHER; note = 2'-deoxy-2'-fluorouridine-3'-phosphate
  modified_base 15: mod_base = OTHER; note = 2'-deoxy-2'-fluoroadenosine-3'-phosphate
  modified_base 16: mod_base = OTHER; note = 2'-O-methyluridine-3'-phosphate
  modified_base 17: mod_base = OTHER; note = 2'-deoxy-2'-fluorouridine-3'-phosphate
  modified_base 18: mod_base = OTHER; note = 2'-O-methylcytidine-3'-phosphate
  modified_base 19: mod_base = OTHER; note = 2'-deoxy-2'-fluorocytidine-3'-phosphate
  modified_base 20: mod_base = OTHER; note = 2'-O-methyladenosine-3'-phosphorothioate
  modified_base 21: mod_base = OTHER; note = 2'-deoxy-2'-fluorouridine
atgtaaccaagagtattccat

SEQ ID NO: 168 - RNA, 21 nt, synthetic construct
  source 1..21: mol_type = other RNA
  modified_base 1: mod_base = OTHER; note = 2'-deoxy-2'-fluoroadenosine-3'-phosphate
  modified_base 2: mod_base = OTHER; note = 2'-O-methyluridine-3'-phosphate
  modified_base 3: mod_base = OTHER; note = 2'-deoxy-2'-fluoroguanosine-3'-phosphate
  modified_base 4: mod_base = OTHER; note = 2'-O-methyluridine-3'-phosphate
  modified_base 5: mod_base = OTHER; note = 2'-deoxy-2'-fluoroadenosine-3'-phosphate
  modified_base 6: mod_base = OTHER; note = 2'-O-methyladenosine-3'-phosphate
  modified_base 7: mod_base = OTHER; note = 2'-O-methylcytidine-3'-phosphate
  modified_base 8: mod_base = OTHER; note = 2'-O-methylcytidine-3'-phosphate
  modified_base 9: mod_base = OTHER; note = 2'-deoxy-2'-fluoroadenosine-3'-phosphate
  modified_base 10: mod_base = OTHER; note = 2'-O-methyladenosine-3'-phosphate
  modified_base 11: mod_base = OTHER; note = 2'-deoxy-2'-fluoroguanosine-3'-phosphate
  modified_base 12: mod_base = OTHER; note = 2'-O-methyladenosine-3'-phosphate
  modified_base 13: mod_base = OTHER; note = 2'-deoxy-2'-fluoroguanosine-3'-phosphate
  modified_base 14: mod_base = OTHER; note = 2'-O-methyluridine-3'-phosphate
  modified_base 15: mod_base = OTHER; note = 2'-deoxy-2'-fluoroadenosine-3'-phosphate
  modified_base 16: mod_base = OTHER; note = 2'-deoxy-2'-fluorouridine-3'-phosphate
  modified_base 17: mod_base = OTHER; note = 2'-deoxy-2'-fluorouridine-3'-phosphate
  modified_base 18: mod_base = OTHER; note = 2'-O-methylcytidine-3'-phosphate
  modified_base 19: mod_base = OTHER; note = 2'-deoxy-2'-fluorocytidine-3'-phosphate
  modified_base 20: mod_base = OTHER; note = 2'-O-methyladenosine-3'-phosphorothioate
  modified_base 21: mod_base = OTHER; note = 2'-deoxy-2'-fluorouridine
atgtaaccaagagtattccat

SEQ ID NO: 169 - RNA, 21 nt, synthetic construct
  source 1..21: mol_type = other RNA
  modified_base 1: mod_base = OTHER; note = 2'-deoxy-2'-fluoroadenosine-3'-phosphate
  modified_base 2: mod_base = OTHER; note = 2'-O-methyluridine-3'-phosphate
  modified_base 3: mod_base = OTHER; note = 2'-deoxy-2'-fluoroguanosine-3'-phosphate
  modified_base 4: mod_base = OTHER; note = 2'-O-methyluridine-3'-phosphate
  modified_base 5: mod_base = OTHER; note = 2'-deoxy-2'-fluoroadenosine-3'-phosphate
  modified_base 6: mod_base = OTHER; note = 2'-O-methyladenosine-3'-phosphate
  modified_base 7: mod_base = OTHER; note = 2'-deoxy-2'-fluorocytidine-3'-phosphate
  modified_base 8: mod_base = OTHER; note = 2'-O-methylcytidine-3'-phosphate
  modified_base 9: mod_base = OTHER; note = 2'-deoxy-2'-fluoroadenosine-3'-phosphate
  modified_base 10: mod_base = OTHER; note = 2'-O-methyladenosine-3'-phosphate
  modified_base 11: mod_base = OTHER; note = 2'-O-methylguanosine-3'-phosphate
  modified_base 12: mod_base = OTHER; note = 2'-O-methyladenosine-3'-phosphate
  modified_base 13: mod_base = OTHER; note = 2'-deoxy-2'-fluoroguanosine-3'-phosphate
  modified_base 14: mod_base = OTHER; note = 2'-deoxy-2'-fluorouridine-3'-phosphate
  modified_base 15: mod_base = OTHER; note = 2'-deoxy-2'-fluoroadenosine-3'-phosphate
  modified_base 16: mod_base = OTHER; note = 2'-O-methyluridine-3'-phosphate
  modified_base 17: mod_base = OTHER; note = 2'-deoxy-2'-fluorouridine-3'-phosphate
  modified_base 18: mod_base = OTHER; note = 2'-O-methylcytidine-3'-phosphate
  modified_base 19: mod_base = OTHER; note = 2'-deoxy-2'-fluorocytidine-3'-phosphate
  modified_base 20: mod_base = OTHER; note = 2'-O-methyladenosine-3'-phosphorothioate
  modified_base 21: mod_base = OTHER; note = 2'-deoxy-2'-fluorouridine
atgtaaccaagagtattccat

SEQ ID NO: 170 - RNA, 21 nt, synthetic construct
  source 1..21: mol_type = other RNA
  modified_base 1: mod_base = OTHER; note = 2'-deoxy-2'-fluoroadenosine-3'-phosphate
  modified_base 2: mod_base = OTHER; note = 2'-O-methyluridine-3'-phosphate
  modified_base 3: mod_base = OTHER; note = 2'-deoxy-2'-fluoroguanosine-3'-phosphate
  modified_base 4: mod_base = OTHER; note = 2'-O-methyluridine-3'-phosphate
  modified_base 5: mod_base = OTHER; note = 2'-deoxy-2'-fluoroadenosine-3'-phosphate
  modified_base 6: mod_base = OTHER; note = 2'-O-methyladenosine-3'-phosphate
  modified_base 7: mod_base = OTHER; note = 2'-deoxy-2'-fluorocytidine-3'-phosphate
  modified_base 8: mod_base = OTHER; note = 2'-O-methylcytidine-3'-phosphate
  modified_base 9: mod_base = OTHER; note = 2'-O-methyladenosine-3'-phosphate
  modified_base 10: mod_base = OTHER; note = 2'-O-methyladenosine-3'-phosphate
  modified_base 11: mod_base = OTHER; note = 2'-deoxy-2'-fluoroguanosine-3'-phosphate
  modified_base 12: mod_base = OTHER; note = 2'-O-methyladenosine-3'-phosphate
  modified_base 13: mod_base = OTHER; note = 2'-deoxy-2'-fluoroguanosine-3'-phosphate
  modified_base 14: mod_base = OTHER; note = 2'-O-methyluridine-3'-phosphate
  modified_base 15: mod_base = OTHER; note = 2'-deoxy-2'-fluoroadenosine-3'-phosphate
  modified_base 16: mod_base = OTHER; note = 2'-deoxy-2'-fluorouridine-3'-phosphate
  modified_base 17: mod_base = OTHER; note = 2'-deoxy-2'-fluorouridine-3'-phosphate
  modified_base 18: mod_base = OTHER; note = 2'-O-methylcytidine-3'-phosphate
  modified_base 19: mod_base = OTHER; note = 2'-deoxy-2'-fluorocytidine-3'-phosphate
  modified_base 20: mod_base = OTHER; note = 2'-O-methyladenosine-3'-phosphorothioate
  modified_base 21: mod_base = OTHER; note = 2'-deoxy-2'-fluorouridine
atgtaaccaagagtattccat

SEQ ID NO: 171 - RNA, 21 nt, synthetic construct
  source 1..21: mol_type = other RNA
  modified_base 1: mod_base = OTHER; note = 2'-deoxy-2'-fluoroadenosine-3'-phosphate
  modified_base 2: mod_base = OTHER; note = 2'-O-methyluridine-3'-phosphate
  modified_base 3: mod_base = OTHER; note = 2'-O-methylguanosine-3'-phosphate
  modified_base 4: mod_base = OTHER; note = 2'-O-methyluridine-3'-phosphate
  modified_base 5: mod_base = OTHER; note = 2'-deoxy-2'-fluoroadenosine-3'-phosphate
  modified_base 6: mod_base = OTHER; note = 2'-O-methyladenosine-3'-phosphate
  modified_base 7: mod_base = OTHER; note = 2'-deoxy-2'-fluorocytidine-3'-phosphate
  modified_base 8: mod_base = OTHER; note = 2'-deoxy-2'-fluorocytidine-3'-phosphate
  modified_base 9: mod_base = OTHER; note = 2'-deoxy-2'-fluoroadenosine-3'-phosphate
  modified_base 10: mod_base = OTHER; note = 2'-O-methyladenosine-3'-phosphate
  modified_base 11: mod_base = OTHER; note = 2'-deoxy-2'-fluoroguanosine-3'-phosphate
  modified_base 12: mod_base = OTHER; note = 2'-O-methyladenosine-3'-phosphate
  modified_base 13: mod_base = OTHER; note = 2'-deoxy-2'-fluoroguanosine-3'-phosphate
  modified_base 14: mod_base = OTHER; note = 2'-O-methyluridine-3'-phosphate
  modified_base 15: mod_base = OTHER; note = 2'-deoxy-2'-fluoroadenosine-3'-phosphate
  modified_base 16: mod_base = OTHER; note = 2'-O-methyluridine-3'-phosphate
  modified_base 17: mod_base = OTHER; note = 2'-deoxy-2'-fluorouridine-3'-phosphate
  modified_base 18: mod_base = OTHER; note = 2'-O-methylcytidine-3'-phosphate
  modified_base 19: mod_base = OTHER; note = 2'-deoxy-2'-fluorocytidine-3'-phosphate
  modified_base 20: mod_base = OTHER; note = 2'-O-methyladenosine-3'-phosphorothioate
  modified_base 21: mod_base = OTHER; note = 2'-deoxy-2'-fluorouridine
atgtaaccaagagtattccat

SEQ ID NO: 172 - RNA, 21 nt, synthetic construct
  source 1..21: mol_type = other RNA
  modified_base 1: mod_base = OTHER; note = 2'-deoxy-2'-fluoroadenosine-3'-phosphate
  modified_base 2: mod_base = OTHER; note = 2'-O-methyluridine-3'-phosphate
  modified_base 3: mod_base = OTHER; note = 2'-deoxy-2'-fluoroguanosine-3'-phosphate
  modified_base 4: mod_base = OTHER; note = 2'-O-methyluridine-3'-phosphate
  modified_base 5: mod_base = OTHER; note = 2'-deoxy-2'-fluoroadenosine-3'-phosphate
  modified_base 6: mod_base = OTHER; note = 2'-O-methyladenosine-3'-phosphate
  modified_base 7: mod_base = OTHER; note = 2'-deoxy-2'-fluorocytidine-3'-phosphate
  modified_base 8: mod_base = OTHER; note = 2'-O-methylcytidine-3'-phosphate
  modified_base 9: mod_base = OTHER; note = 2'-deoxy-2'-fluoroadenosine-3'-phosphate
  modified_base 10: mod_base = OTHER; note = 2'-O-methyladenosine-3'-phosphate
  modified_base 11: mod_base = OTHER; note = 2'-O-methylguanosine-3'-phosphate
  modified_base 12: mod_base = OTHER; note = 2'-O-methyladenosine-3'-phosphate
  modified_base 13: mod_base = OTHER; note = 2'-deoxy-2'-fluoroguanosine-3'-phosphate
  modified_base 14: mod_base = OTHER; note = 2'-O-methyluridine-3'-phosphate
  modified_base 15: mod_base = OTHER; note = 2'-deoxy-2'-fluoroadenosine-3'-phosphate
  modified_base 16: mod_base = OTHER; note = 2'-deoxy-2'-fluorouridine-3'-phosphate
  modified_base 17: mod_base = OTHER; note = 2'-deoxy-2'-fluorouridine-3'-phosphate
  modified_base 18: mod_base = OTHER; note = 2'-O-methylcytidine-3'-phosphate
  modified_base 19: mod_base = OTHER; note = 2'-deoxy-2'-fluorocytidine-3'-phosphate
  modified_base 20: mod_base = OTHER; note = 2'-O-methyladenosine-3'-phosphorothioate
  modified_base 21: mod_base = OTHER; note = 2'-deoxy-2'-fluorouridine
atgtaaccaagagtattccat

SEQ ID NO: 173 - RNA, 21 nt, synthetic construct
  source 1..21: mol_type = other RNA
  modified_base 1: mod_base = OTHER; note = 2'-deoxy-2'-fluoroadenosine-3'-phosphate
  modified_base 2: mod_base = OTHER; note = 2'-O-methyluridine-3'-phosphate
  modified_base 3: mod_base = OTHER; note = 2'-deoxy-2'-fluoroguanosine-3'-phosphate
  modified_base 4: mod_base = OTHER; note = 2'-O-methyluridine-3'-phosphate
  modified_base 5: mod_base = OTHER; note = 2'-deoxy-2'-fluoroadenosine-3'-phosphate
  modified_base 6: mod_base = OTHER; note = 2'-O-methyladenosine-3'-phosphate
  modified_base 7: mod_base = OTHER; note = 2'-deoxy-2'-fluorocytidine-3'-phosphate
  modified_base 8: mod_base = OTHER; note = 2'-deoxy-2'-fluorocytidine-3'-phosphate
  modified_base 9: mod_base = OTHER; note = 2'-deoxy-2'-fluoroadenosine-3'-phosphate
  modified_base 10: mod_base = OTHER; note = 2'-O-methyladenosine-3'-phosphate
  modified_base 11: mod_base = OTHER; note = 2'-O-methylguanosine-3'-phosphate
  modified_base 12: mod_base = OTHER; note = 2'-O-methyladenosine-3'-phosphate
  modified_base 13: mod_base = OTHER; note = 2'-deoxy-2'-fluoroguanosine-3'-phosphate
  modified_base 14: mod_base = OTHER; note = 2'-O-methyluridine-3'-phosphate
  modified_base 15: mod_base = OTHER; note = 2'-deoxy-2'-fluoroadenosine-3'-phosphate
  modified_base 16: mod_base = OTHER; note = 2'-O-methyluridine-3'-phosphate
  modified_base 17: mod_base = OTHER; note = 2'-deoxy-2'-fluorouridine-3'-phosphate
  modified_base 18: mod_base = OTHER; note = 2'-O-methylcytidine-3'-phosphate
  modified_base 19: mod_base = OTHER; note = 2'-deoxy-2'-fluorocytidine-3'-phosphate
  modified_base 20: mod_base = OTHER; note = 2'-O-methyladenosine-3'-phosphorothioate
  modified_base 21: mod_base = OTHER; note = 2'-deoxy-2'-fluorouridine
atgtaaccaagagtattccat

SEQ ID NO: 174 - RNA, 21 nt, synthetic construct
  source 1..21: mol_type = other RNA
  modified_base 1: mod_base = OTHER; note = 2'-O-methyladenosine-3'-phosphate
  modified_base 2: mod_base = OTHER; note = 2'-O-methyluridine-3'-phosphate
  modified_base 3: mod_base = OTHER; note = 2'-deoxy-2'-fluoroguanosine-3'-phosphate
  modified_base 4: mod_base = OTHER; note = 2'-O-methyluridine-3'-phosphate
  modified_base 5: mod_base = OTHER; note = 2'-deoxy-2'-fluoroadenosine-3'-phosphate
  modified_base 6: mod_base = OTHER; note = 2'-O-methyladenosine-3'-phosphate
  modified_base 7: mod_base = OTHER; note = 2'-deoxy-2'-fluorocytidine-3'-phosphate
  modified_base 8: mod_base = OTHER; note = 2'-O-methylcytidine-3'-phosphate
  modified_base 9: mod_base = OTHER; note = 2'-deoxy-2'-fluoroadenosine-3'-phosphate
  modified_base 10: mod_base = OTHER; note = 2'-O-methyladenosine-3'-phosphate
  modified_base 11: mod_base = OTHER; note = 2'-deoxy-2'-fluoroguanosine-3'-phosphate
  modified_base 12: mod_base = OTHER; note = 2'-O-methyladenosine-3'-phosphate
  modified_base 13: mod_base = OTHER; note = 2'-deoxy-2'-fluoroguanosine-3'-phosphate
  modified_base 14: mod_base = OTHER; note = 2'-O-methyluridine-3'-phosphate
  modified_base 15: mod_base = OTHER; note = 2'-deoxy-2'-fluoroadenosine-3'-phosphate
  modified_base 16: mod_base = OTHER; note = 2'-deoxy-2'-fluorouridine-3'-phosphate
  modified_base 17: mod_base = OTHER; note = 2'-deoxy-2'-fluorouridine-3'-phosphate
  modified_base 18: mod_base = OTHER; note = 2'-O-methylcytidine-3'-phosphate
  modified_base 19: mod_base = OTHER; note = 2'-deoxy-2'-fluorocytidine-3'-phosphate
  modified_base 20: mod_base = OTHER; note = 2'-O-methyladenosine-3'-phosphorothioate
  modified_base 21: mod_base = OTHER; note = 2'-deoxy-2'-fluorouridine
atgtaaccaagagtattccat

SEQ ID NO: 175 - RNA, 21 nt, synthetic construct
  source 1..21: mol_type = other RNA
  modified_base 1: mod_base = OTHER; note = 2'-deoxy-2'-fluoroadenosine-3'-phosphate
  modified_base 2: mod_base = OTHER; note = 2'-O-methyluridine-3'-phosphate
  modified_base 3: mod_base = OTHER; note = 2'-O-methylguanosine-3'-phosphate
  modified_base 4: mod_base = OTHER; note = 2'-O-methyluridine-3'-phosphate
  modified_base 5: mod_base = OTHER; note = 2'-deoxy-2'-fluoroadenosine-3'-phosphate
  modified_base 6: mod_base = OTHER; note = 2'-O-methyladenosine-3'-phosphate
  modified_base 7: mod_base = OTHER; note = 2'-deoxy-2'-fluorocytidine-3'-phosphate
  modified_base 8: mod_base = OTHER; note = 2'-O-methylcytidine-3'-phosphate
  modified_base 9: mod_base = OTHER; note = 2'-deoxy-2'-fluoroadenosine-3'-phosphate
  modified_base 10: mod_base = OTHER; note = 2'-O-methyladenosine-3'-phosphate
  modified_base 11: mod_base = OTHER; note = 2'-deoxy-2'-fluoroguanosine-3'-phosphate
  modified_base 12: mod_base = OTHER; note = 2'-O-methyladenosine-3'-phosphate
  modified_base 13: mod_base = OTHER; note = 2'-deoxy-2'-fluoroguanosine-3'-phosphate
  modified_base 14: mod_base = OTHER; note = 2'-O-methyluridine-3'-phosphate
  modified_base 15: mod_base = OTHER; note = 2'-deoxy-2'-fluoroadenosine-3'-phosphate
  modified_base 16: mod_base = OTHER; note = 2'-deoxy-2'-fluorouridine-3'-phosphate
  modified_base 17: mod_base = OTHER; note = 2'-deoxy-2'-fluorouridine-3'-phosphate
  modified_base 18: mod_base = OTHER; note = 2'-O-methylcytidine-3'-phosphate
  modified_base 19: mod_base = OTHER; note = 2'-deoxy-2'-fluorocytidine-3'-phosphate
  modified_base 20: mod_base = OTHER; note = 2'-O-methyladenosine-3'-phosphorothioate
  modified_base 21: mod_base = OTHER; note = 2'-deoxy-2'-fluorouridine
atgtaaccaagagtattccat

SEQ ID NO: 176 - RNA, 21 nt, synthetic construct
  source 1..21: mol_type = other RNA
  modified_base 1: mod_base = OTHER; note = 2'-O-methyladenosine-3'-phosphate
  modified_base 2: mod_base = OTHER; note = 2'-O-methyluridine-3'-phosphate
  modified_base 3: mod_base = OTHER; note = 2'-deoxy-2'-fluoroguanosine-3'-phosphate
  modified_base 4: mod_base = OTHER; note = 2'-O-methyluridine-3'-phosphate
  modified_base 5: mod_base = OTHER; note = 2'-deoxy-2'-fluoroadenosine-3'-phosphate
  modified_base 6: mod_base = OTHER; note = 2'-O-methyladenosine-3'-phosphate
  modified_base 7: mod_base = OTHER; note = 2'-deoxy-2'-fluorocytidine-3'-phosphate
  modified_base 8: mod_base = OTHER; note = 2'-O-methylcytidine-3'-phosphate
  modified_base 9: mod_base = OTHER; note = 2'-deoxy-2'-fluoroadenosine-3'-phosphate
  modified_base 10: mod_base = OTHER; note = 2'-O-methyladenosine-3'-phosphate
  modified_base 11: mod_base = OTHER; note = 2'-deoxy-2'-fluoroguanosine-3'-phosphate
  modified_base 12: mod_base = OTHER; note = 2'-O-methyladenosine-3'-phosphate
  modified_base 13: mod_base = OTHER; note = 2'-deoxy-2'-fluoroguanosine-3'-phosphate
  modified_base 14: mod_base = OTHER; note = 2'-O-methyluridine-3'-phosphate
  modified_base 15: mod_base = OTHER; note = 2'-deoxy-2'-fluoroadenosine-3'-phosphate
  modified_base 16: mod_base = OTHER; note = 2'-O-methyluridine-3'-phosphate
  modified_base 17: mod_base = OTHER; note = 2'-deoxy-2'-fluorouridine-3'-phosphate
  modified_base 18: mod_base = OTHER; note = 2'-deoxy-2'-fluorocytidine-3'-phosphate
  modified_base 19: mod_base = OTHER; note = 2'-deoxy-2'-fluorocytidine-3'-phosphate
  modified_base 20: mod_base = OTHER; note = 2'-O-methyladenosine-3'-phosphorothioate
  modified_base 21: mod_base = OTHER; note = 2'-deoxy-2'-fluorouridine
atgtaaccaagagtattccat

SEQ ID NO: 177 - RNA, 21 nt, synthetic construct
  source 1..21: mol_type = other RNA
  modified_base 1: mod_base = OTHER; note = 2'-deoxy-2'-fluoroadenosine-3'-phosphate
  modified_base 2: mod_base = OTHER; note = 2'-O-methyluridine-3'-phosphate
  modified_base 3: mod_base = OTHER; note = 2'-deoxy-2'-fluoroguanosine-3'-phosphate
  modified_base 4: mod_base = OTHER; note = 2'-O-methyluridine-3'-phosphate
  modified_base 5: mod_base = OTHER; note = 2'-deoxy-2'-fluoroadenosine-3'-phosphate
  modified_base 6: mod_base = OTHER; note = 2'-O-methyladenosine-3'-phosphate
  modified_base 7: mod_base = OTHER; note = 2'-deoxy-2'-fluorocytidine-3'-phosphate
  modified_base 8: mod_base = OTHER; note = 2'-deoxy-2'-fluorocytidine-3'-phosphate
  modified_base 9: mod_base = OTHER; note = 2'-deoxy-2'-fluoroadenosine-3'-phosphate
  modified_base 10: mod_base = OTHER; note = 2'-O-methyladenosine-3'-phosphate
  modified_base 11: mod_base = OTHER; note = 2'-deoxy-2'-fluoroguanosine-3'-phosphate
  modified_base 12: mod_base = OTHER; note = 2'-O-methyladenosine-3'-phosphate
  modified_base 13: mod_base = OTHER; note = 2'-deoxy-2'-fluoroguanosine-3'-phosphate
  modified_base 14: mod_base = OTHER; note = 2'-O-methyluridine-3'-phosphate
  modified_base 15: mod_base = OTHER; note = 2'-deoxy-2'-fluoroadenosine-3'-phosphate
  modified_base 16: mod_base = OTHER; note = 2'-O-methyluridine-3'-phosphate
  modified_base 17: mod_base = OTHER; note = 2'-O-methyluridine-3'-phosphate
  modified_base 18: mod_base = OTHER; note = 2'-O-methylcytidine-3'-phosphate
  modified_base 19: mod_base = OTHER; note = 2'-deoxy-2'-fluorocytidine-3'-phosphate
  modified_base 20: mod_base = OTHER; note = 2'-O-methyladenosine-3'-phosphorothioate
  modified_base 21: mod_base = OTHER; note = 2'-deoxy-2'-fluorouridine
atgtaaccaagagtattccat

SEQ ID NO: 178 - RNA, 21 nt, synthetic construct
  source 1..21: mol_type = other RNA
  modified_base 1: mod_base = OTHER; note = 2'-deoxy-2'-fluoroadenosine-3'-phosphate
  modified_base 2: mod_base = OTHER; note = 2'-O-methyluridine-3'-phosphate
  modified_base 3: mod_base = OTHER; note = 2'-deoxy-2'-fluoroguanosine-3'-phosphate
  modified_base 4: mod_base = OTHER; note = 2'-O-methyluridine-3'-phosphate
  modified_base 5: mod_base = OTHER; note = 2'-deoxy-2'-fluoroadenosine-3'-phosphate
  modified_base 6: mod_base = OTHER; note = 2'-O-methyladenosine-3'-phosphate
  modified_base 7: mod_base = OTHER; note = 2'-deoxy-2'-fluorocytidine-3'-phosphate
  modified_base 8: mod_base = OTHER; note = 2'-O-methylcytidine-3'-phosphate
  modified_base 9: mod_base = OTHER; note = 2'-O-methyladenosine-3'-phosphate
  modified_base 10: mod_base = OTHER; note = 2'-O-methyladenosine-3'-phosphate
  modified_base 11: mod_base = OTHER; note = 2'-deoxy-2'-fluoroguanosine-3'-phosphate
  modified_base 12: mod_base = OTHER; note = 2'-deoxy-2'-fluoroadenosine-3'-phosphate
  modified_base 13: mod_base = OTHER; note = 2'-deoxy-2'-fluoroguanosine-3'-phosphate
  modified_base 14: mod_base = OTHER; note = 2'-O-methyluridine-3'-phosphate
  modified_base 15: mod_base = OTHER; note = 2'-deoxy-2'-fluoroadenosine-3'-phosphate
  modified_base 16: mod_base = OTHER; note = 2'-O-methyluridine-3'-phosphate
  modified_base 17: mod_base = OTHER; note = 2'-deoxy-2'-fluorouridine-3'-phosphate
  modified_base 18: mod_base = OTHER; note = 2'-O-methylcytidine-3'-phosphate
  modified_base 19: mod_base = OTHER; note = 2'-deoxy-2'-fluorocytidine-3'-phosphate
  modified_base 20: mod_base = OTHER; note = 2'-O-methyladenosine-3'-phosphorothioate
  modified_base 21: mod_base = OTHER; note = 2'-deoxy-2'-fluorouridine
atgtaaccaagagtattccat

SEQ ID NO: 179 - RNA, 21 nt, synthetic construct
  source 1..21: mol_type = other RNA
  modified_base 1: mod_base = OTHER; note = 2'-deoxy-2'-fluoroadenosine-3'-phosphate
  modified_base 2: mod_base = OTHER; note = 2'-O-methyluridine-3'-phosphate
  modified_base 3: mod_base = OTHER; note = 2'-deoxy-2'-fluoroguanosine-3'-phosphate
  modified_base 4: mod_base = OTHER; note = 2'-O-methyluridine-3'-phosphate
  modified_base 5: mod_base = OTHER; note = 2'-O-methyladenosine-3'-phosphate
  modified_base 6: mod_base = OTHER; note = 2'-O-methyladenosine-3'-phosphate
  modified_base 7: mod_base = OTHER; note = 2'-deoxy-2'-fluorocytidine-3'-phosphate
  modified_base 8: mod_base = OTHER; note = 2'-O-methylcytidine-3'-phosphate
  modified_base 9: mod_base = OTHER; note = 2'-deoxy-2'-fluoroadenosine-3'-phosphate
  modified_base 10: mod_base = OTHER; note = 2'-O-methyladenosine-3'-phosphate
  modified_base 11: mod_base = OTHER; note = 2'-deoxy-2'-fluoroguanosine-3'-phosphate
  modified_base 12: mod_base = OTHER; note = 2'-O-methyladenosine-3'-phosphate
  modified_base 13: mod_base = OTHER; note = 2'-deoxy-2'-fluoroguanosine-3'-phosphate
  modified_base 14: mod_base = OTHER; note = 2'-O-methyluridine-3'-phosphate
  modified_base 15: mod_base = OTHER; note = 2'-deoxy-2'-fluoroadenosine-3'-phosphate
  modified_base 16: mod_base = OTHER; note = 2'-deoxy-2'-fluorouridine-3'-phosphate
  modified_base 17: mod_base = OTHER; note = 2'-deoxy-2'-fluorouridine-3'-phosphate
  modified_base 18: mod_base = OTHER; note = 2'-O-methylcytidine-3'-phosphate
  modified_base 19: mod_base = OTHER; note = 2'-deoxy-2'-fluorocytidine-3'-phosphate
  modified_base 20: mod_base = OTHER; note = 2'-O-methyladenosine-3'-phosphorothioate
  modified_base 21: mod_base = OTHER; note = 2'-deoxy-2'-fluorouridine
atgtaaccaagagtattccat

SEQ ID NO: 180 - RNA, 21 nt, synthetic construct
  source 1..21: mol_type = other RNA
  modified_base 1: mod_base = OTHER; note = 2'-deoxy-2'-fluoroadenosine-3'-phosphate
  modified_base 2: mod_base = OTHER; note = 2'-O-methyluridine-3'-phosphate
  modified_base 3: mod_base = OTHER; note = 2'-O-methylguanosine-3'-phosphate
  modified_base 4: mod_base = OTHER; note = 2'-O-methyluridine-3'-phosphate
  modified_base 5: mod_base = OTHER; note = 2'-deoxy-2'-fluoroadenosine-3'-phosphate
  modified_base 6: mod_base = OTHER; note = 2'-O-methyladenosine-3'-phosphate
  modified_base 7: mod_base = OTHER; note = 2'-deoxy-2'-fluorocytidine-3'-phosphate
  modified_base 8: mod_base = OTHER; note = 2'-O-methylcytidine-3'-phosphate
  modified_base 9: mod_base = OTHER; note = 2'-deoxy-2'-fluoroadenosine-3'-phosphate
  modified_base 10: mod_base = OTHER; note = 2'-O-methyladenosine-3'-phosphate
  modified_base 11: mod_base = OTHER; note = 2'-deoxy-2'-fluoroguanosine-3'-phosphate
  modified_base 12: mod_base = OTHER; note = 2'-O-methyladenosine-3'-phosphate
  modified_base 13: mod_base = OTHER; note = 2'-deoxy-2'-fluoroguanosine-3'-phosphate
  modified_base 14: mod_base = OTHER; note = 2'-O-methyluridine-3'-phosphate
  modified_base 15: mod_base = OTHER; note = 2'-deoxy-2'-fluoroadenosine-3'-phosphate
  modified_base 16: mod_base = OTHER; note = 2'-O-methyluridine-3'-phosphate
  modified_base 17: mod_base = OTHER; note = 2'-deoxy-2'-fluorouridine-3'-phosphate
  modified_base 18: mod_base = OTHER; note = 2'-deoxy-2'-fluorocytidine-3'-phosphate
  modified_base 19: mod_base = OTHER; note = 2'-deoxy-2'-fluorocytidine-3'-phosphate
  modified_base 20: mod_base = OTHER; note = 2'-O-methyladenosine-3'-phosphorothioate
  modified_base 21: mod_base = OTHER; note = 2'-deoxy-2'-fluorouridine
atgtaaccaagagtattccat

SEQ ID NO: 181 - RNA, 21 nt, synthetic construct
  source 1..21: mol_type = other RNA
  modified_base 1: mod_base = OTHER; note = 2'-O-methyladenosine-3'-phosphate
  modified_base 2: mod_base = OTHER; note = 2'-O-methyluridine-3'-phosphate
  modified_base 3: mod_base = OTHER; note = 2'-deoxy-2'-fluoroguanosine-3'-phosphate
  modified_base 4: mod_base = OTHER; note = 2'-O-methyluridine-3'-phosphate
  modified_base 5: mod_base = OTHER; note = 2'-deoxy-2'-fluoroadenosine-3'-phosphate
  modified_base 6: mod_base = OTHER; note = 2'-O-methyladenosine-3'-phosphate
  modified_base 7: mod_base = OTHER; note = 2'-deoxy-2'-fluorocytidine-3'-phosphate
  modified_base 8: mod_base = OTHER; note = 2'-O-methylcytidine-3'-phosphate
  modified_base 9: mod_base = OTHER; note = 2'-deoxy-2'-fluoroadenosine-3'-phosphate
  modified_base 10: mod_base = OTHER; note = 2'-O-methyladenosine-3'-phosphate
  modified_base 11: mod_base = OTHER; note = 2'-deoxy-2'-fluoroguanosine-3'-phosphate
  modified_base 12: mod_base = OTHER; note = 2'-O-methyladenosine-3'-phosphate
  modified_base 13: mod_base = OTHER; note = 2'-deoxy-2'-fluoroguanosine-3'-phosphate
  modified_base 14: mod_base = OTHER; note = 2'-O-methyluridine-3'-phosphate
  modified_base 15: mod_base = OTHER; note = 2'-deoxy-2'-fluoroadenosine-3'-phosphate
  modified_base 16: mod_base = OTHER; note = 2'-O-methyluridine-3'-phosphate
  modified_base 17: mod_base = OTHER; note = 2'-deoxy-2'-fluorouridine-3'-phosphate
  modified_base 18: mod_base = OTHER; note = 2'-O-methylcytidine-3'-phosphate
  modified_base 19: mod_base = OTHER; note = 2'-deoxy-2'-fluorocytidine-3'-phosphate
  modified_base 20: mod_base = OTHER; note = 2'-deoxy-2'-fluoroadenosine-3'-phosphorothioate
  modified_base 21: mod_base = OTHER; note = 2'-deoxy-2'-fluorouridine
atgtaaccaagagtattccat

SEQ ID NO: 182 - RNA, 21 nt, synthetic construct
  source 1..21: mol_type = other RNA
  modified_base 1: mod_base = OTHER; note = 2'-deoxy-2'-fluoroadenosine-3'-phosphate
  modified_base 2: mod_base = OTHER; note = 2'-O-methyluridine-3'-phosphate
  modified_base 3: mod_base = OTHER; note = 2'-deoxy-2'-fluoroguanosine-3'-phosphate
  modified_base 4: mod_base = OTHER; note = 2'-O-methyluridine-3'-phosphate
  modified_base 5: mod_base = OTHER; note = 2'-deoxy-2'-fluoroadenosine-3'-phosphate
  modified_base 6: mod_base = OTHER; note = 2'-O-methyladenosine-3'-phosphate
  modified_base 7: mod_base = OTHER; note = 2'-deoxy-2'-fluorocytidine-3'-phosphate
  modified_base 8: mod_base = OTHER; note = 2'-O-methylcytidine-3'-phosphate
  modified_base 9: mod_base = OTHER; note = 2'-deoxy-2'-fluoroadenosine-3'-phosphate
  modified_base 10: mod_base = OTHER; note = 2'-O-methyladenosine-3'-phosphate
  modified_base 11: mod_base = OTHER; note = 2'-deoxy-2'-fluoroguanosine-3'-phosphate
  modified_base 12: mod_base = OTHER; note = 2'-O-methyladenosine-3'-phosphate
  modified_base 13: mod_base = OTHER; note = 2'-deoxy-2'-fluoroguanosine-3'-phosphate
  modified_base 14: mod_base = OTHER; note = 2'-O-methyluridine-3'-phosphate
  modified_base 15: mod_base = OTHER; note = 2'-deoxy-2'-fluoroadenosine-3'-phosphate
  modified_base 16: mod_base = OTHER; note = 2'-O-methyluridine-3'-phosphate
  modified_base 17: mod_base = OTHER; note = 2'-O-methyluridine-3'-phosphate
  modified_base 18: mod_base = OTHER; note = 2'-O-methylcytidine-3'-phosphate
  modified_base 19: mod_base = OTHER; note = 2'-deoxy-2'-fluorocytidine-3'-phosphate
  modified_base 20: mod_base = OTHER; note = 2'-deoxy-2'-fluoroadenosine-3'-phosphorothioate
  modified_base 21: mod_base = OTHER; note = 2'-deoxy-2'-fluorouridine
atgtaaccaagagtattccat

SEQ ID NO: 183 - RNA, 21 nt, synthetic construct
  source 1..21: mol_type = other RNA
  modified_base 1: mod_base = OTHER; note = 2'-O-methyladenosine-3'-phosphate
  modified_base 2: mod_base = OTHER; note = 2'-O-methyluridine-3'-phosphate
  modified_base 3: mod_base = OTHER; note = 2'-O-methylguanosine-3'-phosphate
  modified_base 4: mod_base = OTHER; note = 2'-O-methyluridine-3'-phosphate
  modified_base 5: mod_base = OTHER; note = 2'-O-methyladenosine-3'-phosphate
  modified_base 6: mod_base = OTHER; note = 2'-O-methyladenosine-3'-phosphate
  modified_base 7: mod_base = OTHER; note = 2'-O-methylcytidine-3'-phosphate
  modified_base 8: mod_base = OTHER; note = 2'-O-methylcytidine-3'-phosphate
  modified_base 9: mod_base = OTHER; note = 2'-deoxy-2'-fluoroadenosine-3'-phosphate
  modified_base 10: mod_base = OTHER; note = 2'-O-methyladenosine-3'-phosphate
  modified_base 11: mod_base = OTHER; note = 2'-deoxy-2'-fluoroguanosine-3'-phosphate
  modified_base 12: mod_base = OTHER; note = 2'-O-methyladenosine-3'-phosphate
  modified_base 13: mod_base = OTHER; note = 2'-deoxy-2'-fluoroguanosine-3'-phosphate
  modified_base 14: mod_base = OTHER; note = 2'-O-methyluridine-3'-phosphate
  modified_base 15: mod_base = OTHER; note = 2'-deoxy-2'-fluoroadenosine-3'-phosphate
  modified_base 16: mod_base = OTHER; note = 2'-O-methyluridine-3'-phosphate
  modified_base 17: mod_base = OTHER; note = 2'-deoxy-2'-fluorouridine-3'-phosphate
  modified_base 18: mod_base = OTHER; note = 2'-O-methylcytidine-3'-phosphate
  modified_base 19: mod_base = OTHER; note = 2'-deoxy-2'-fluorocytidine-3'-phosphate
  modified_base 20: mod_base = OTHER; note = 2'-O-methyladenosine-3'-phosphorothioate
  modified_base 21: mod_base = OTHER; note = 2'-deoxy-2'-fluorouridine
atgtaaccaagagtattccat

SEQ ID NO: 184 - RNA, 21 nt, synthetic construct
  source 1..21: mol_type = other RNA
  modified_base 1: mod_base = OTHER; note = 2'-deoxy-2'-fluoroadenosine-3'-phosphate
  modified_base 2: mod_base = OTHER; note = 2'-O-methyluridine-3'-phosphate
  modified_base 3: mod_base = OTHER; note = 2'-deoxy-2'-fluoroguanosine-3'-phosphate
  modified_base 4: mod_base = OTHER; note = 2'-O-methyluridine-3'-phosphate
  modified_base 5: mod_base = OTHER; note = 2'-O-methyladenosine-3'-phosphate
  modified_base 6: mod_base = OTHER; note = 2'-O-methyladenosine-3'-phosphate
  modified_base 7: mod_base = OTHER; note = 2'-deoxy-2'-fluorocytidine-3'-phosphate
  modified_base 8: mod_base = OTHER; note = 2'-O-methylcytidine-3'-phosphate
  modified_base 9: mod_base = OTHER; note = 2'-deoxy-2'-fluoroadenosine-3'-phosphate
  modified_base 10: mod_base = OTHER; note = 2'-O-methyladenosine-3'-phosphate
  modified_base 11: mod_base = OTHER; note = 2'-deoxy-2'-fluoroguanosine-3'-phosphate
  modified_base 12: mod_base = OTHER; note = 2'-O-methyladenosine-3'-phosphate
  modified_base 13: mod_base = OTHER; note = 2'-deoxy-2'-fluoroguanosine-3'-phosphate
  modified_base 14: mod_base = OTHER; note = 2'-O-methyluridine-3'-phosphate
  modified_base 15: mod_base = OTHER; note = 2'-deoxy-2'-fluoroadenosine-3'-phosphate
  modified_base 16: mod_base = OTHER; note = 2'-O-methyluridine-3'-phosphate
  modified_base 17: mod_base = OTHER; note = 2'-deoxy-2'-fluorouridine-3'-phosphate
  modified_base 18: mod_base = OTHER; note = 2'-deoxy-2'-fluorocytidine-3'-phosphate
  modified_base 19: mod_base = OTHER; note = 2'-deoxy-2'-fluorocytidine-3'-phosphate
  modified_base 20: mod_base = OTHER; note = 2'-O-methyladenosine-3'-phosphorothioate
  modified_base 21: mod_base = OTHER; note = 2'-deoxy-2'-fluorouridine
atgtaaccaagagtattccat

SEQ ID NO: 185 - RNA, 21 nt, synthetic construct
  source 1..21: mol_type = other RNA
  modified_base 1: mod_base = OTHER; note = 2'-deoxy-2'-fluoroadenosine-3'-phosphate
  modified_base 2: mod_base = OTHER; note = 2'-O-methyluridine-3'-phosphate
  modified_base 3: mod_base = OTHER; note = 2'-O-methylguanosine-3'-phosphate
  modified_base 4: mod_base = OTHER; note = 2'-O-methyluridine-3'-phosphate
  modified_base 5: mod_base = OTHER; note = 2'-deoxy-2'-fluoroadenosine-3'-phosphate
  modified_base 6: mod_base = OTHER; note = 2'-O-methyladenosine-3'-phosphate
  modified_base 7: mod_base = OTHER; note = 2'-deoxy-2'-fluorocytidine-3'-phosphate
  modified_base 8: mod_base = OTHER; note = 2'-O-methylcytidine-3'-phosphate
  modified_base 9: mod_base = OTHER; note = 2'-deoxy-2'-fluoroadenosine-3'-phosphate
  modified_base 10: mod_base = OTHER; note = 2'-O-methyladenosine-3'-phosphate
  modified_base 11: mod_base = OTHER; note = 2'-deoxy-2'-fluoroguanosine-3'-phosphate
  modified_base 12: mod_base = OTHER; note = 2'-O-methyladenosine-3'-phosphate
  modified_base 13: mod_base = OTHER; note = 2'-deoxy-2'-fluoroguanosine-3'-phosphate
  modified_base 14: mod_base = OTHER; note = 2'-O-methyluridine-3'-phosphate
  modified_base 15: mod_base = OTHER; note = 2'-deoxy-2'-fluoroadenosine-3'-phosphate
  modified_base 16: mod_base = OTHER; note = 2'-O-methyluridine-3'-phosphate
  modified_base 17: mod_base = OTHER; note = 2'-deoxy-2'-fluorouridine-3'-phosphate
  modified_base 18: mod_base = OTHER; note = 2'-O-methylcytidine-3'-phosphate
  modified_base 19: mod_base = OTHER; note = 2'-deoxy-2'-fluorocytidine-3'-phosphate
  modified_base 20: mod_base = OTHER; note = 2'-deoxy-2'-fluoroadenosine-3'-phosphorothioate
  modified_base 21: mod_base = OTHER; note = 2'-deoxy-2'-fluorouridine
atgtaaccaagagtattccat

SEQ ID NO: 186 - RNA, 21 nt, synthetic construct
  source 1..21: mol_type = other RNA
  modified_base 1: mod_base = OTHER; note = 2'-O-methyladenosine-3'-phosphate
  modified_base 2: mod_base = OTHER; note = 2'-O-methyluridine-3'-phosphate
  modified_base 3: mod_base = OTHER; note = 2'-deoxy-2'-fluoroguanosine-3'-phosphate
  modified_base 4: mod_base = OTHER; note = 2'-O-methyluridine-3'-phosphate
  modified_base 5: mod_base = OTHER; note = 2'-deoxy-2'-fluoroadenosine-3'-phosphate
  modified_base 6: mod_base = OTHER; note = 2'-O-methyladenosine-3'-phosphate
  modified_base 7: mod_base = OTHER; note = 2'-deoxy-2'-fluorocytidine-3'-phosphate
  modified_base 8: mod_base = OTHER; note = 2'-O-methylcytidine-3'-phosphate
  modified_base 9: mod_base = OTHER; note = 2'-deoxy-2'-fluoroadenosine-3'-phosphate
  modified_base 10: mod_base = OTHER; note = 2'-O-methyladenosine-3'-phosphate
  modified_base 11: mod_base = OTHER; note = 2'-deoxy-2'-fluoroguanosine-3'-phosphate
  modified_base 12: mod_base = OTHER; note = 2'-O-methyladenosine-3'-phosphate
  modified_base 13: mod_base = OTHER; note = 2'-deoxy-2'-fluoroguanosine-3'-phosphate
  modified_base 14: mod_base = OTHER; note = 2'-O-methyluridine-3'-phosphate
  modified_base 15: mod_base = OTHER; note = 2'-deoxy-2'-fluoroadenosine-3'-phosphate
  modified_base 16: mod_base = OTHER; note = 2'-O-methyluridine-3'-phosphate
  modified_base 17: mod_base = OTHER; note = 2'-deoxy-2'-fluorouridine-3'-phosphate
  modified_base 18: mod_base = OTHER; note = 2'-O-methylcytidine-3'-phosphate
  modified_base 19: mod_base = OTHER; note = 2'-O-methylcytidine-3'-phosphate
  modified_base 20: mod_base = OTHER; note = 2'-O-methyladenosine-3'-phosphorothioate
  modified_base 21: mod_base = OTHER; note = 2'-O-methyluridine
atgtaaccaagagtattccat

SEQ ID NO: 187 - RNA, 21 nt, synthetic construct
  source 1..21: mol_type = other RNA
  modified_base 1: mod_base = OTHER; note = 2'-O-methyladenosine-3'-phosphate
  modified_base 2: mod_base = OTHER; note = 2'-O-methyluridine-3'-phosphate
  modified_base 3: mod_base = OTHER; note = 2'-O-methylguanosine-3'-phosphate
  modified_base 4: mod_base = OTHER; note = 2'-O-methyluridine-3'-phosphate
  modified_base 5: mod_base = OTHER; note = 2'-O-methyladenosine-3'-phosphate
  modified_base 6: mod_base = OTHER; note = 2'-O-methyladenosine-3'-phosphate
  modified_base 7: mod_base = OTHER; note = 2'-O-methylcytidine-3'-phosphate
  modified_base 8: mod_base = OTHER; note = 2'-O-methylcytidine-3'-phosphate
  modified_base 9: mod_base = OTHER; note = 2'-O-methyladenosine-3'-phosphate
  modified_base 10: mod_base = OTHER; note = 2'-O-methyladenosine-3'-phosphate
  modified_base 11: mod_base = OTHER; note = 2'-deoxy-2'-fluoroguanosine-3'-phosphate
  modified_base 12: mod_base = OTHER; note = 2'-O-methyladenosine-3'-phosphate
  modified_base 13: mod_base = OTHER; note = 2'-deoxy-2'-fluoroguanosine-3'-phosphate
  modified_base 14: mod_base = OTHER; note = 2'-O-methyluridine-3'-phosphate
  modified_base 15: mod_base = OTHER; note = 2'-deoxy-2'-fluoroadenosine-3'-phosphate
  modified_base 16: mod_base = OTHER; note = 2'-O-methyluridine-3'-phosphate
  modified_base 17: mod_base = OTHER; note = 2'-deoxy-2'-fluorouridine-3'-phosphate
  modified_base 18: mod_base = OTHER; note = 2'-O-methylcytidine-3'-phosphate
  modified_base 19: mod_base = OTHER; note = 2'-deoxy-2'-fluorocytidine-3'-phosphate
  modified_base 20: mod_base = OTHER; note = 2'-O-methyladenosine-3'-phosphorothioate
  modified_base 21: mod_base = OTHER; note = 2'-deoxy-2'-fluorouridine
atgtaaccaagagtattccat

SEQ ID NO: 188 - RNA, 21 nt, synthetic construct
  source 1..21: mol_type = other RNA
  modified_base 1: mod_base = OTHER; note = 2'-deoxy-2'-fluoroadenosine-3'-phosphate
  modified_base 2: mod_base = OTHER; note = 2'-O-methyluridine-3'-phosphate
  modified_base 3: mod_base = OTHER; note = 2'-deoxy-2'-fluoroguanosine-3'-phosphate
  modified_base 4: mod_base = OTHER; note = 2'-O-methyluridine-3'-phosphate
  modified_base 5: mod_base = OTHER; note = 2'-deoxy-2'-fluoroadenosine-3'-phosphate
  modified_base 6: mod_base = OTHER; note = 2'-O-methyladenosine-3'-phosphate
  modified_base 7: mod_base = OTHER; note = 2'-O-methylcytidine-3'-phosphate
  modified_base 8: mod_base = OTHER; note = 2'-O-methylcytidine-3'-phosphate
  modified_base 9: mod_base = OTHER; note = 2'-deoxy-2'-fluoroadenosine-3'-phosphate
  modified_base 10: mod_base = OTHER; note = 2'-O-methyladenosine-3'-phosphate
  modified_base 11: mod_base = OTHER; note = 2'-deoxy-2'-fluoroguanosine-3'-phosphate
  modified_base 12: mod_base = OTHER; note = 2'-O-methyladenosine-3'-phosphate
  modified_base 13: mod_base = OTHER; note = 2'-deoxy-2'-fluoroguanosine-3'-phosphate
  modified_base 14: mod_base = OTHER; note = 2'-O-methyluridine-3'-phosphate
  modified_base 15: mod_base = OTHER; note = 2'-deoxy-2'-fluoroadenosine-3'-phosphate
  modified_base 16: mod_base = OTHER; note = 2'-O-methyluridine-3'-phosphate
  modified_base 17: mod_base = OTHER; note = 2'-deoxy-2'-fluorouridine-3'-phosphate
  modified_base 18: mod_base = OTHER; note = 2'-deoxy-2'-fluorocytidine-3'-phosphate
  modified_base 19: mod_base = OTHER; note = 2'-deoxy-2'-fluorocytidine-3'-phosphate
  modified_base 20: mod_base = OTHER; note = 2'-O-methyladenosine-3'-phosphorothioate
  modified_base 21: mod_base = OTHER; note = 2'-deoxy-2'-fluorouridine
atgtaaccaagagtattccat

SEQ ID NO: 189 - RNA, 21 nt, synthetic construct
  source 1..21: mol_type = other RNA
  modified_base 1: mod_base = OTHER; note = 2'-deoxy-2'-fluoroadenosine-3'-phosphate
  modified_base 2: mod_base = OTHER; note = 2'-O-methyluridine-3'-phosphate
  modified_base 3: mod_base = OTHER; note = 2'-deoxy-2'-fluoroguanosine-3'-phosphate
  modified_base 4: mod_base = OTHER; note = 2'-O-methyluridine-3'-phosphate
  modified_base 5: mod_base = OTHER; note = 2'-O-methyladenosine-3'-phosphate
  modified_base 6: mod_base = OTHER; note = 2'-O-methyladenosine-3'-phosphate
  modified_base 7: mod_base = OTHER; note = 2'-deoxy-2'-fluorocytidine-3'-phosphate
  modified_base 8: mod_base = OTHER; note = 2'-O-methylcytidine-3'-phosphate
  modified_base 9: mod_base = OTHER; note = 2'-deoxy-2'-fluoroadenosine-3'-phosphate
  modified_base 10: mod_base = OTHER; note = 2'-O-methyladenosine-3'-phosphate
  modified_base 11: mod_base = OTHER; note = 2'-deoxy-2'-fluoroguanosine-3'-phosphate
  modified_base 12: mod_base = OTHER; note = 2'-O-methyladenosine-3'-phosphate
  modified_base 13: mod_base = OTHER; note = 2'-deoxy-2'-fluoroguanosine-3'-phosphate
  modified_base 14: mod_base = OTHER; note = 2'-O-methyluridine-3'-phosphate
  modified_base 15: mod_base = OTHER; note = 2'-deoxy-2'-fluoroadenosine-3'-phosphate
  modified_base 16: mod_base = OTHER; note = 2'-O-methyluridine-3'-phosphate
  modified_base 17: mod_base = OTHER; note = 2'-deoxy-2'-fluorouridine-3'-phosphate
  modified_base 18: mod_base = OTHER; note = 2'-O-methylcytidine-3'-phosphate
  modified_base 19: mod_base = OTHER; note = 2'-deoxy-2'-fluorocytidine-3'-phosphate
  modified_base 20: mod_base = OTHER; note = 2'-deoxy-2'-fluoroadenosine-3'-phosphorothioate
  modified_base 21: mod_base = OTHER; note = 2'-deoxy-2'-fluorouridine
atgtaaccaagagtattccat

SEQ ID NO: 190 - RNA, 21 nt, synthetic construct
  source 1..21: mol_type = other RNA
  modified_base 1: mod_base = OTHER; note = 2'-O-methyladenosine-3'-phosphate
  modified_base 2: mod_base = OTHER; note = 2'-O-methyluridine-3'-phosphate
  modified_base 3: mod_base = OTHER; note = 2'-deoxy-2'-fluoroguanosine-3'-phosphate
  modified_base 4: mod_base = OTHER; note = 2'-O-methyluridine-3'-phosphate
  modified_base 5: mod_base = OTHER; note = 2'-deoxy-2'-fluoroadenosine-3'-phosphate
  modified_base 6: mod_base = OTHER; note = 2'-O-methyladenosine-3'-phosphate
  modified_base 7: mod_base = OTHER; note = 2'-deoxy-2'-fluorocytidine-3'-phosphate
  modified_base 8: mod_base = OTHER; note = 2'-O-methylcytidine-3'-phosphate
  modified_base 9: mod_base = OTHER; note = 2'-deoxy-2'-fluoroadenosine-3'-phosphate
  modified_base 10: mod_base = OTHER; note = 2'-O-methyladenosine-3'-phosphate
  modified_base 11: mod_base = OTHER; note = 2'-deoxy-2'-fluoroguanosine-3'-phosphate
  modified_base 12: mod_base = OTHER; note = 2'-O-methyladenosine-3'-phosphate
  modified_base 13: mod_base = OTHER; note = 2'-deoxy-2'-fluoroguanosine-3'-phosphate
  modified_base 14: mod_base = OTHER; note = 2'-O-methyluridine-3'-phosphate
  modified_base 15: mod_base = OTHER; note = 2'-deoxy-2'-fluoroadenosine-3'-phosphate
  modified_base 16: mod_base = OTHER; note = 2'-O-methyluridine-3'-phosphate
  modified_base 17: mod_base = OTHER; note = 2'-O-methyluridine-3'-phosphate
  modified_base 18: mod_base = OTHER; note = 2'-O-methylcytidine-3'-phosphate
  modified_base 19: mod_base = OTHER; note = 2'-O-methylcytidine-3'-phosphate
  modified_base 20: mod_base = OTHER; note = 2'-O-methyladenosine-3'-phosphorothioate
  modified_base 21: mod_base = OTHER; note = 2'-O-methyluridine
atgtaaccaagagtattccat

SEQ ID NO: 191 - RNA, 21 nt, synthetic construct
  source 1..21: mol_type = other RNA
  modified_base 1: mod_base = OTHER; note = 2'-O-methyladenosine-3'-phosphate
  modified_base 2: mod_base = OTHER; note = 2'-O-methyluridine-3'-phosphate
  modified_base 3: mod_base = OTHER; note = 2'-O-methylguanosine-3'-phosphate
  modified_base 4: mod_base = OTHER; note = 2'-O-methyluridine-3'-phosphate
  modified_base 5: mod_base = OTHER; note = 2'-O-methyladenosine-3'-phosphate
  modified_base 6: mod_base = OTHER; note = 2'-O-methyladenosine-3'-phosphate
  modified_base 7: mod_base = OTHER; note = 2'-O-methylcytidine-3'-phosphate
  modified_base 8: mod_base = OTHER; note = 2'-O-methylcytidine-3'-phosphate
  modified_base 9: mod_base = OTHER; note = 2'-O-methyladenosine-3'-phosphate
  modified_base 10: mod_base = OTHER; note = 2'-O-methyladenosine-3'-phosphate
  modified_base 11: mod_base = OTHER; note = 2'-O-methylguanosine-3'-phosphate
  modified_base 12: mod_base = OTHER; note = 2'-O-methyladenosine-3'-phosphate
  modified_base 13: mod_base = OTHER; note = 2'-deoxy-2'-fluoroguanosine-3'-phosphate
  modified_base 14: mod_base = OTHER; note = 2'-O-methyluridine-3'-phosphate
  modified_base 15: mod_base = OTHER; note = 2'-deoxy-2'-fluoroadenosine-3'-phosphate
  modified_base 16: mod_base = OTHER; note = 2'-O-methyluridine-3'-phosphate
  modified_base 17: mod_base = OTHER; note = 2'-deoxy-2'-fluorouridine-3'-phosphate
  modified_base 18: mod_base = OTHER; note = 2'-O-methylcytidine-3'-phosphate
  modified_base 19: mod_base = OTHER; note = 2'-deoxy-2'-fluorocytidine-3'-phosphate
  modified_base 20: mod_base = OTHER; note = 2'-O-methyladenosine-3'-phosphorothioate
  modified_base 21: mod_base = OTHER; note = 2'-deoxy-2'-fluorouridine
atgtaaccaagagtattccat

SEQ ID NO: 192 - RNA, 21 nt, synthetic construct
  source 1..21: mol_type = other RNA
  modified_base 1: mod_base = OTHER; note = 2'-deoxy-2'-fluoroadenosine-3'-phosphate
  modified_base 2: mod_base = OTHER; note = 2'-O-methyluridine-3'-phosphate
  modified_base 3: mod_base = OTHER; note = 2'-deoxy-2'-fluoroguanosine-3'-phosphate
  modified_base 4: mod_base = OTHER; note = 2'-O-methyluridine-3'-phosphate
  modified_base 5: mod_base = OTHER; note = 2'-deoxy-2'-fluoroadenosine-3'-phosphate
  modified_base 6: mod_base = OTHER; note = 2'-O-methyladenosine-3'-phosphate
  modified_base 7: mod_base = OTHER; note = 2'-deoxy-2'-fluorocytidine-3'-phosphate
  modified_base 8: mod_base = OTHER; note = 2'-O-methylcytidine-3'-phosphate
  modified_base 9: mod_base = OTHER; note = 2'-O-methyladenosine-3'-phosphate
  modified_base 10: mod_base = OTHER; note = 2'-O-methyladenosine-3'-phosphate
  modified_base 11: mod_base = OTHER; note = 2'-deoxy-2'-fluoroguanosine-3'-phosphate
  modified_base 12: mod_base = OTHER; note = 2'-O-methyladenosine-3'-phosphate
  modified_base 13: mod_base = OTHER; note = 2'-deoxy-2'-fluoroguanosine-3'-phosphate
  modified_base 14: mod_base = OTHER; note = 2'-O-methyluridine-3'-phosphate
  modified_base 15: mod_base = OTHER; note = 2'-deoxy-2'-fluoroadenosine-3'-phosphate
  modified_base 16: mod_base = OTHER; note = 2'-O-methyluridine-3'-phosphate
  modified_base 17: mod_base = OTHER; note = 2'-deoxy-2'-fluorouridine-3'-phosphate
  modified_base 18: mod_base = OTHER; note = 2'-deoxy-2'-fluorocytidine-3'-phosphate
  modified_base 19: mod_base = OTHER; note = 2'-deoxy-2'-fluorocytidine-3'-phosphate
  modified_base 20: mod_base = OTHER; note = 2'-O-methyladenosine-3'-phosphorothioate
  modified_base 21: mod_base = OTHER; note = 2'-deoxy-2'-fluorouridine
atgtaaccaagagtattccat

SEQ ID NO: 193 - RNA, 21 nt, synthetic construct
  source 1..21: mol_type = other RNA
  modified_base 1: mod_base = OTHER; note = 2'-deoxy-2'-fluoroadenosine-3'-phosphate
  modified_base 2: mod_base = OTHER; note = 2'-O-methyluridine-3'-phosphate
  modified_base 3: mod_base = OTHER; note = 2'-deoxy-2'-fluoroguanosine-3'-phosphate
  modified_base 4: mod_base = OTHER; note = 2'-O-methyluridine-3'-phosphate
  modified_base 5: mod_base = OTHER; note = 2'-deoxy-2'-fluoroadenosine-3'-phosphate
  modified_base 6: mod_base = OTHER; note = 2'-O-methyladenosine-3'-phosphate
  modified_base 7: mod_base = OTHER; note = 2'-O-methylcytidine-3'-phosphate
  modified_base 8: mod_base = OTHER; note = 2'-O-methylcytidine-3'-phosphate
  modified_base 9: mod_base = OTHER; note = 2'-deoxy-2'-fluoroadenosine-3'-phosphate
  modified_base 10: mod_base = OTHER; note = 2'-O-methyladenosine-3'-phosphate
  modified_base 11: mod_base = OTHER; note = 2'-deoxy-2'-fluoroguanosine-3'-phosphate
  modified_base 12: mod_base = OTHER; note = 2'-O-methyladenosine-3'-phosphate
  modified_base 13: mod_base = OTHER; note = 2'-deoxy-2'-fluoroguanosine-3'-phosphate
  modified_base 14: mod_base = OTHER; note = 2'-O-methyluridine-3'-phosphate
  modified_base 15: mod_base = OTHER; note = 2'-deoxy-2'-fluoroadenosine-3'-phosphate
  modified_base 16: mod_base = OTHER; note = 2'-O-methyluridine-3'-phosphate
  modified_base 17: mod_base = OTHER; note = 2'-deoxy-2'-fluorouridine-3'-phosphate
  modified_base 18: mod_base = OTHER; note = 2'-O-methylcytidine-3'-phosphate
  modified_base 19: mod_base = OTHER; note = 2'-deoxy-2'-fluorocytidine-3'-phosphate
  modified_base 20: mod_base = OTHER; note = 2'-deoxy-2'-fluoroadenosine-3'-phosphorothioate
  modified_base 21: mod_base = OTHER; note = 2'-deoxy-2'-fluorouridine
atgtaaccaagagtattccat

SEQ ID NO: 194 - RNA, 21 nt, synthetic construct
  source 1..21: mol_type = other RNA
  modified_base 1: mod_base = OTHER; note = 2'-deoxy-2'-fluoroadenosine-3'-phosphate
  modified_base 2: mod_base = OTHER; note = 2'-O-methyluridine-3'-phosphate
  modified_base 3: mod_base = OTHER; note = 2'-deoxy-2'-fluoroguanosine-3'-phosphate
  modified_base 4: mod_base = OTHER; note = 2'-O-methyluridine-3'-phosphate
  modified_base 5: mod_base = OTHER; note = 2'-deoxy-2'-fluoroadenosine-3'-phosphate
  modified_base 6: mod_base = OTHER; note = 2'-O-methyladenosine-3'-phosphate
  modified_base 7: mod_base = OTHER; note = 2'-deoxy-2'-fluorocytidine-3'-phosphate
  modified_base 8: mod_base = OTHER; note = 2'-O-methylcytidine-3'-phosphate
  modified_base 9: mod_base = OTHER; note = 2'-deoxy-2'-fluoroadenosine-3'-phosphate
  modified_base 10: mod_base = OTHER; note = 2'-O-methyladenosine-3'-phosphate
  modified_base 11: mod_base = OTHER; note = 2'-deoxy-2'-fluoroguanosine-3'-phosphate
  modified_base 12: mod_base = OTHER; note = 2'-O-methyladenosine-3'-phosphate
  modified_base 13: mod_base = OTHER; note = 2'-deoxy-2'-fluoroguanosine-3'-phosphate
  modified_base 14: mod_base = OTHER; note = 2'-O-methyluridine-3'-phosphate
  modified_base 15: mod_base = OTHER; note = 2'-deoxy-2'-fluoroadenosine-3'-phosphate
  modified_base 16: mod_base = OTHER; note = 2'-O-methyluridine-3'-phosphate
  modified_base 17: mod_base = OTHER; note = 2'-O-methyluridine-3'-phosphate
  modified_base 18: mod_base = OTHER; note = 2'-O-methylcytidine-3'-phosphate
  modified_base 19: mod_base = OTHER; note = 2'-O-methylcytidine-3'-phosphate
  modified_base 20: mod_base = OTHER; note = 2'-O-methyladenosine-3'-phosphorothioate
  modified_base 21: mod_base = OTHER; note = 2'-O-methyluridine
atgtaaccaagagtattccat

SEQ ID NO: 195 - RNA, 21 nt, synthetic construct
  source 1..21: mol_type = other RNA
  modified_base 1: mod_base = OTHER; note = 2'-O-methyladenosine-3'-phosphate
  modified_base 2: mod_base = OTHER; note = 2'-O-methyluridine-3'-phosphate
  modified_base 3: mod_base = OTHER; note = 2'-O-methylguanosine-3'-phosphate
  modified_base 4: mod_base = OTHER; note = 2'-O-methyluridine-3'-phosphate
  modified_base 5: mod_base = OTHER; note = 2'-O-methyladenosine-3'-phosphate
  modified_base 6: mod_base = OTHER; note = 2'-O-methyladenosine-3'-phosphate
  modified_base 7: mod_base = OTHER; note = 2'-O-methylcytidine-3'-phosphate
  modified_base 8: mod_base = OTHER; note = 2'-O-methylcytidine-3'-phosphate
  modified_base 9: mod_base = OTHER; note = 2'-O-methyladenosine-3'-phosphate
  modified_base 10: mod_base = OTHER; note = 2'-O-methyladenosine-3'-phosphate
  modified_base 11: mod_base = OTHER; note = 2'-O-methylguanosine-3'-phosphate
  modified_base 12: mod_base = OTHER; note = 2'-O-methyladenosine-3'-phosphate
  modified_base 13: mod_base = OTHER; note = 2'-O-methylguanosine-3'-phosphate
  modified_base 14: mod_base = OTHER; note = 2'-O-methyluridine-3'-phosphate
  modified_base 15: mod_base = OTHER; note = 2'-O-methyladenosine-3'-phosphate
  modified_base 16: mod_base = OTHER; note = 2'-O-methyluridine-3'-phosphate
  modified_base 17: mod_base = OTHER; note = 2'-O-methyluridine-3'-phosphate
  modified_base 18: mod_base = OTHER; note = 2'-O-methylcytidine-3'-phosphate
  modified_base 19: mod_base = OTHER; note = 2'-O-methylcytidine-3'-phosphate
  modified_base 20: mod_base = OTHER; note = 2'-O-methyladenosine-3'-phosphorothioate
  modified_base 21: mod_base = OTHER; note = 2'-O-methyluridine
atgtaaccaagagtattccat

SEQ ID NO: 196 - RNA, 21 nt, synthetic construct
  source 1..21: mol_type = other RNA
  modified_base 1: mod_base = OTHER; note = 2'-deoxy-2'-fluoroadenosine-3'-phosphate
  modified_base 2: mod_base = OTHER; note = 2'-O-methyluridine-3'-phosphate
  modified_base 3: mod_base = OTHER; note = 2'-deoxy-2'-fluoroguanosine-3'-phosphate
  modified_base 4: mod_base = OTHER; note = 2'-O-methyluridine-3'-phosphate
  modified_base 5: mod_base = OTHER; note = 2'-deoxy-2'-fluoroadenosine-3'-phosphate
  modified_base 6: mod_base = OTHER; note = 2'-O-methyladenosine-3'-phosphate
  modified_base 7: mod_base = OTHER; note = 2'-deoxy-2'-fluorocytidine-3'-phosphate
  modified_base 8: mod_base = OTHER; note = 2'-O-methylcytidine-3'-phosphate
  modified_base 9: mod_base = OTHER; note = 2'-deoxy-2'-fluoroadenosine-3'-phosphate
  modified_base 10: mod_base = OTHER; note = 2'-O-methyladenosine-3'-phosphate
  modified_base 11: mod_base = OTHER; note = 2'-deoxy-2'-fluoroguanosine-3'-phosphate
  modified_base 12: mod_base = OTHER; note = 2'-O-methyladenosine-3'-phosphate
  modified_base 13: mod_base = OTHER; note = 2'-deoxy-2'-fluoroguanosine-3'-phosphate
  modified_base 14: mod_base = OTHER; note = 2'-O-methyluridine-3'-phosphate
  modified_base 15: mod_base = OTHER; note = 2'-deoxy-2'-fluoroadenosine-3'-phosphate
  modified_base 16: mod_base = OTHER; note = 2'-O-methyluridine-3'-phosphate
  modified_base 17: mod_base = OTHER; note = 2'-deoxy-2'-fluorouridine-3'-phosphate
  modified_base 18: mod_base = OTHER; note = 2'-O-methylcytidine-3'-phosphate
  modified_base 19: mod_base = OTHER; note = 2'-deoxy-2'-fluorocytidine-3'-phosphate
  modified_base 20: mod_base = OTHER; note = 2'-O-methyladenosine-3'-phosphorothioate
  modified_base 21: mod_base = OTHER; note = 2'-deoxy-2'-fluorouridine
atgtaaccaagagtattccat

SEQ ID NO: 197 - RNA, 21 nt, synthetic construct
  source 1..21: mol_type = other RNA
  modified_base 1: mod_base = OTHER; note = 2'-deoxy-2'-fluoroadenosine-3'-phosphate
  modified_base 2: mod_base = OTHER; note = 2'-O-methyluridine-3'-phosphate
  modified_base 3: mod_base = OTHER; note = 2'-deoxy-2'-fluoroguanosine-3'-phosphate
  modified_base 4: mod_base = OTHER; note = 2'-O-methyluridine-3'-phosphate
  modified_base 5: mod_base = OTHER; note = 2'-deoxy-2'-fluoroadenosine-3'-phosphate
  modified_base 6: mod_base = OTHER; note = 2'-O-methyladenosine-3'-phosphate
  modified_base 7: mod_base = OTHER; note = 2'-deoxy-2'-fluorocytidine-3'-phosphate
  modified_base 8: mod_base = OTHER; note = 2'-O-methylcytidine-3'-phosphate
  modified_base 9: mod_base = OTHER; note = 2'-deoxy-2'-fluoroadenosine-3'-phosphate
  modified_base 10: mod_base = OTHER; note = 2'-O-methyladenosine-3'-phosphate
  modified_base 11: mod_base = OTHER; note = 2'-O-methylguanosine-3'-phosphate
  modified_base 12: mod_base = OTHER; note = 2'-O-methyladenosine-3'-phosphate
  modified_base 13: mod_base = OTHER; note = 2'-deoxy-2'-fluoroguanosine-3'-phosphate
  modified_base 14: mod_base = OTHER; note = 2'-O-methyluridine-3'-phosphate
  modified_base 15: mod_base = OTHER; note = 2'-deoxy-2'-fluoroadenosine-3'-phosphate
  modified_base 16: mod_base = OTHER; note = 2'-O-methyluridine-3'-phosphate
  modified_base 17: mod_base = OTHER; note = 2'-deoxy-2'-fluorouridine-3'-phosphate
  modified_base 18: mod_base = OTHER; note = 2'-deoxy-2'-fluorocytidine-3'-phosphate
  modified_base 19: mod_base = OTHER; note = 2'-deoxy-2'-fluorocytidine-3'-phosphate
  modified_base 20: mod_base = OTHER; note = 2'-O-methyladenosine-3'-phosphorothioate
  modified_base 21: mod_base = OTHER; note = 2'-deoxy-2'-fluorouridine
atgtaaccaagagtattccat

SEQ ID NO: 198 - RNA, 21 nt, synthetic construct
  source 1..21: mol_type = other RNA
  modified_base 1: mod_base = OTHER; note = 2'-deoxy-2'-fluoroadenosine-3'-phosphate
  modified_base 2: mod_base = OTHER; note = 2'-O-methyluridine-3'-phosphate
  modified_base 3: mod_base = OTHER; note = 2'-deoxy-2'-fluoroguanosine-3'-phosphate
  modified_base 4: mod_base = OTHER; note = 2'-O-methyluridine-3'-phosphate
  modified_base 5: mod_base = OTHER; note = 2'-deoxy-2'-fluoroadenosine-3'-phosphate
  modified_base 6: mod_base = OTHER; note = 2'-O-methyladenosine-3'-phosphate
  modified_base 7: mod_base = OTHER; note = 2'-deoxy-2'-fluorocytidine-3'-phosphate
  modified_base 8: mod_base = OTHER; note = 2'-O-methylcytidine-3'-phosphate
  modified_base 9: mod_base = OTHER; note = 2'-O-methyladenosine-3'-phosphate
  modified_base 10: mod_base = OTHER; note = 2'-O-methyladenosine-3'-phosphate
  modified_base 11: mod_base = OTHER; note = 2'-deoxy-2'-fluoroguanosine-3'-phosphate
  modified_base 12: mod_base = OTHER; note = 2'-O-methyladenosine-3'-phosphate
  modified_base 13: mod_base = OTHER; note = 2'-deoxy-2'-fluoroguanosine-3'-phosphate
  modified_base 14: mod_base = OTHER; note = 2'-O-methyluridine-3'-phosphate
  modified_base 15: mod_base = OTHER; note = 2'-deoxy-2'-fluoroadenosine-3'-phosphate
  modified_base 16: mod_base = OTHER; note = 2'-O-methyluridine-3'-phosphate
  modified_base 17: mod_base = OTHER; note = 2'-deoxy-2'-fluorouridine-3'-phosphate
  modified_base 18: mod_base = OTHER; note = 2'-O-methylcytidine-3'-phosphate
  modified_base 19: mod_base = OTHER; note = 2'-deoxy-2'-fluorocytidine-3'-phosphate
  modified_base 20: mod_base = OTHER; note = 2'-deoxy-2'-fluoroadenosine-3'-phosphorothioate
  modified_base 21: mod_base = OTHER; note = 2'-deoxy-2'-fluorouridine
atgtaaccaagagtattccat

SEQ ID NO: 199 - RNA, 21 nt, synthetic construct
  source 1..21: mol_type = other RNA
  modified_base 1: mod_base = OTHER; note = 2'-deoxy-2'-fluoroadenosine-3'-phosphate
  modified_base 2: mod_base = OTHER; note = 2'-O-methyluridine-3'-phosphate
  modified_base 3: mod_base = OTHER; note = 2'-deoxy-2'-fluoroguanosine-3'-phosphate
  modified_base 4: mod_base = OTHER; note = 2'-O-methyluridine-3'-phosphate
  modified_base 5: mod_base = OTHER; note = 2'-deoxy-2'-fluoroadenosine-3'-phosphate
  modified_base 6: mod_base = OTHER; note = 2'-O-methyladenosine-3'-phosphate
  modified_base 7: mod_base = OTHER; note = 2'-deoxy-2'-fluorocytidine-3'-phosphate
  modified_base 8: mod_base = OTHER; note = 2'-O-methylcytidine-3'-phosphate
  modified_base 9: mod_base = OTHER; note = 2'-deoxy-2'-fluoroadenosine-3'-phosphate
  modified_base 10: mod_base = OTHER; note = 2'-O-methyladenosine-3'-phosphate
  modified_base 11: mod_base = OTHER; note = 2'-deoxy-2'-fluoroguanosine-3'-phosphate
  modified_base 12: mod_base = OTHER; note = 2'-O-methyladenosine-3'-phosphate
  modified_base 13: mod_base = OTHER; note = 2'-deoxy-2'-fluoroguanosine-3'-phosphate
  modified_base 14: mod_base = OTHER; note = 2'-O-methyluridine-3'-phosphate
  modified_base 15: mod_base = OTHER; note = 2'-O-methyladenosine-3'-phosphate
  modified_base 16: mod_base = OTHER; note = 2'-O-methyluridine-3'-phosphate
  modified_base 17: mod_base = OTHER; note = 2'-O-methyluridine-3'-phosphate
  modified_base 18: mod_base = OTHER; note = 2'-O-methylcytidine-3'-phosphate
  modified_base 19: mod_base = OTHER; note = 2'-O-methylcytidine-3'-phosphate
  modified_base 20: mod_base = OTHER; note = 2'-O-methyladenosine-3'-phosphorothioate
  modified_base 21: mod_base = OTHER; note = 2'-O-methyluridine
atgtaaccaagagtattccat

SEQ ID NO: 200 - RNA, 21 nt, synthetic construct
  source 1..21: mol_type = other RNA
  modified_base 1: mod_base = OTHER; note = 2'-deoxy-2'-fluoroadenosine-3'-phosphate
  modified_base 2: mod_base = OTHER; note = 2'-O-methyluridine-3'-phosphate
  modified_base 3: mod_base = OTHER; note = 2'-deoxy-2'-fluoroguanosine-3'-phosphate
  modified_base 4: mod_base = OTHER; note = 2'-O-methyluridine-3'-phosphate
  modified_base 5: mod_base = OTHER; note = 2'-deoxy-2'-fluoroadenosine-3'-phosphate
  modified_base 6: mod_base = OTHER; note = 2'-O-methyladenosine-3'-phosphate
  modified_base 7: mod_base = OTHER; note = 2'-deoxy-2'-fluorocytidine-3'-phosphate
  modified_base 8: mod_base = OTHER; note = 2'-O-methylcytidine-3'-phosphate
  modified_base 9: mod_base = OTHER; note = 2'-deoxy-2'-fluoroadenosine-3'-phosphate
  modified_base 10: mod_base = OTHER; note = 2'-O-methyladenosine-3'-phosphate
  modified_base 11: mod_base = OTHER; note = 2'-deoxy-2'-fluoroguanosine-3'-phosphate
  modified_base 12: mod_base = OTHER; note = 2'-O-methyladenosine-3'-phosphate
  modified_base 13: mod_base = OTHER; note = 2'-deoxy-2'-fluoroguanosine-3'-phosphate
  modified_base 14: mod_base = OTHER; note = 2'-O-methyluridine-3'-phosphate
  modified_base 15: mod_base = OTHER; note = 2'-deoxy-2'-fluoroadenosine-3'-phosphate
  modified_base 16: mod_base = OTHER; note = 2'-O-methyluridine-3'-phosphate
  modified_base 17: mod_base = OTHER; note = 2'-deoxy-2'-fluorouridine-3'-phosphate
  modified_base 18: mod_base = OTHER; note = 2'-O-methylcytidine-3'-phosphate
  modified_base 19: mod_base = OTHER; note = 2'-deoxy-2'-fluorocytidine-3'-phosphate
  modified_base 20: mod_base = OTHER; note = 2'-O-methyladenosine-3'-phosphorothioate
  modified_base 21: mod_base = OTHER; note = 2'-deoxy-2'-fluorouridine
atgtaaccaagagtattccat

SEQ ID NO: 201 - RNA, 21 nt, synthetic construct
  source 1..21: mol_type = other RNA
  modified_base 1: mod_base = OTHER; note = 2'-deoxy-2'-fluoroadenosine-3'-phosphate
  modified_base 2: mod_base = OTHER; note = 2'-O-methyluridine-3'-phosphate
  modified_base 3: mod_base = OTHER; note = 2'-deoxy-2'-fluoroguanosine-3'-phosphate
  modified_base 4: mod_base = OTHER; note = 2'-O-methyluridine-3'-phosphate
  modified_base 5: mod_base = OTHER; note = 2'-deoxy-2'-fluoroadenosine-3'-phosphate
  modified_base 6: mod_base = OTHER; note = 2'-O-methyladenosine-3'-phosphate
  modified_base 7: mod_base = OTHER; note = 2'-deoxy-2'-fluorocytidine-3'-phosphate
  modified_base 8: mod_base = OTHER; note = 2'-O-methylcytidine-3'-phosphate
  modified_base 9: mod_base = OTHER; note = 2'-deoxy-2'-fluoroadenosine-3'-phosphate
  modified_base 10: mod_base = OTHER; note = 2'-O-methyladenosine-3'-phosphate
  modified_base 11: mod_base = OTHER; note = 2'-deoxy-2'-fluoroguanosine-3'-phosphate
  modified_base 12: mod_base = OTHER; note = 2'-O-methyladenosine-3'-phosphate
  modified_base 13: mod_base = OTHER; note = 2'-O-methylguanosine-3'-phosphate
  modified_base 14: mod_base = OTHER; note = 2'-O-methyluridine-3'-phosphate
  modified_base 15: mod_base = OTHER; note = 2'-deoxy-2'-fluoroadenosine-3'-phosphate
  modified_base 16: mod_base = OTHER; note = 2'-O-methyluridine-3'-phosphate
  modified_base 17: mod_base = OTHER; note = 2'-deoxy-2'-fluorouridine-3'-phosphate
  modified_base 18: mod_base = OTHER; note = 2'-deoxy-2'-fluorocytidine-3'-phosphate
  modified_base 19: mod_base = OTHER; note = 2'-deoxy-2'-fluorocytidine-3'-phosphate
  modified_base 20: mod_base = OTHER; note = 2'-O-methyladenosine-3'-phosphorothioate
  modified_base 21: mod_base = OTHER; note = 2'-deoxy-2'-fluorouridine
atgtaaccaagagtattccat

SEQ ID NO: 202 - RNA, 21 nt, synthetic construct
  source 1..21: mol_type = other RNA
  modified_base 1: mod_base = OTHER; note = 2'-deoxy-2'-fluoroadenosine-3'-phosphate
  modified_base 2: mod_base = OTHER; note = 2'-O-methyluridine-3'-phosphate
  modified_base 3: mod_base = OTHER; note = 2'-deoxy-2'-fluoroguanosine-3'-phosphate
  modified_base 4: mod_base = OTHER; note = 2'-O-methyluridine-3'-phosphate
  modified_base 5: mod_base = OTHER; note = 2'-deoxy-2'-fluoroadenosine-3'-phosphate
  modified_base 6: mod_base = OTHER; note = 2'-O-methyladenosine-3'-phosphate
  modified_base 7: mod_base = OTHER; note = 2'-deoxy-2'-fluorocytidine-3'-phosphate
  modified_base 8: mod_base = OTHER; note = 2'-O-methylcytidine-3'-phosphate
  modified_base 9: mod_base = OTHER; note = 2'-deoxy-2'-fluoroadenosine-3'-phosphate
  modified_base 10: mod_base = OTHER; note = 2'-O-methyladenosine-3'-phosphate
  modified_base 11: mod_base = OTHER; note = 2'-O-methylguanosine-3'-phosphate
  modified_base 12: mod_base = OTHER; note = 2'-O-methyladenosine-3'-phosphate
  modified_base 13: mod_base = OTHER; note = 2'-deoxy-2'-fluoroguanosine-3'-phosphate
  modified_base 14: mod_base = OTHER; note = 2'-O-methyluridine-3'-phosphate
  modified_base 15: mod_base = OTHER; note = 2'-deoxy-2'-fluoroadenosine-3'-phosphate
  modified_base 16: mod_base = OTHER; note = 2'-O-methyluridine-3'-phosphate
  modified_base 17: mod_base = OTHER; note = 2'-deoxy-2'-fluorouridine-3'-phosphate
  modified_base 18: mod_base = OTHER; note = 2'-O-methylcytidine-3'-phosphate
  modified_base 19: mod_base = OTHER; note = 2'-deoxy-2'-fluorocytidine-3'-phosphate
  modified_base 20: mod_base = OTHER; note = 2'-deoxy-2'-fluoroadenosine-3'-phosphorothioate
  modified_base 21: mod_base = OTHER; note = 2'-deoxy-2'-fluorouridine
atgtaaccaagagtattccat

SEQ ID NO: 203 - RNA, 21 nt, synthetic construct
  source 1..21: mol_type = other RNA
  modified_base 1: mod_base = OTHER; note = 2'-O-methyladenosine-3'-phosphate
  modified_base 2: mod_base = OTHER; note = 2'-O-methyluridine-3'-phosphate
  modified_base 3: mod_base = OTHER; note = 2'-O-methylguanosine-3'-phosphate
  modified_base 4: mod_base = OTHER; note = 2'-O-methyluridine-3'-phosphate
  modified_base 5: mod_base = OTHER; note = 2'-deoxy-2'-fluoroadenosine-3'-phosphate
  modified_base 6: mod_base = OTHER; note = 2'-O-methyladenosine-3'-phosphate
  modified_base 7: mod_base = OTHER; note = 2'-deoxy-2'-fluorocytidine-3'-phosphate
  modified_base 8: mod_base = OTHER; note = 2'-O-methylcytidine-3'-phosphate
  modified_base 9: mod_base = OTHER; note = 2'-deoxy-2'-fluoroadenosine-3'-phosphate
  modified_base 10: mod_base = OTHER; note = 2'-O-methyladenosine-3'-phosphate
  modified_base 11: mod_base = OTHER; note = 2'-deoxy-2'-fluoroguanosine-3'-phosphate
  modified_base 12: mod_base = OTHER; note = 2'-O-methyladenosine-3'-phosphate
  modified_base 13: mod_base = OTHER; note = 2'-deoxy-2'-fluoroguanosine-3'-phosphate
  modified_base 14: mod_base = OTHER; note = 2'-O-methyluridine-3'-phosphate
  modified_base 15: mod_base = OTHER; note = 2'-deoxy-2'-fluoroadenosine-3'-phosphate
  modified_base 16: mod_base = OTHER; note = 2'-O-methyluridine-3'-phosphate
  modified_base 17: mod_base = OTHER; note = 2'-deoxy-2'-fluorouridine-3'-phosphate
  modified_base 18: mod_base = OTHER; note = 2'-O-methylcytidine-3'-phosphate
  modified_base 19: mod_base = OTHER; note = 2'-O-methylcytidine-3'-phosphate
  modified_base 20: mod_base = OTHER; note = 2'-O-methyladenosine-3'-phosphorothioate
  modified_base 21: mod_base = OTHER; note = 2'-O-methyluridine
atgtaaccaagagtattccat

SEQ ID NO: 204 - RNA, 21 nt, synthetic construct
  source 1..21: mol_type = other RNA
  modified_base 1: mod_base = OTHER; note = 2'-deoxy-2'-fluoroadenosine-3'-phosphate
  modified_base 2: mod_base = OTHER; note = 2'-O-methyluridine-3'-phosphate
  modified_base 3: mod_base = OTHER; note = 2'-deoxy-2'-fluoroguanosine-3'-phosphate
  modified_base 4: mod_base = OTHER; note = 2'-O-methyluridine-3'-phosphate
  modified_base 5: mod_base = OTHER; note = 2'-deoxy-2'-fluoroadenosine-3'-phosphate
  modified_base 6: mod_base = OTHER; note = 2'-O-methyladenosine-3'-phosphate
  modified_base 7: mod_base = OTHER; note = 2'-deoxy-2'-fluorocytidine-3'-phosphate
  modified_base 8: mod_base = OTHER; note = 2'-O-methylcytidine-3'-phosphate
  modified_base 9: mod_base = OTHER; note = 2'-deoxy-2'-fluoroadenosine-3'-phosphate
  modified_base 10: mod_base = OTHER; note = 2'-O-methyladenosine-3'-phosphate
  modified_base 11: mod_base = OTHER; note = 2'-deoxy-2'-fluoroguanosine-3'-phosphate
  modified_base 12: mod_base = OTHER; note = 2'-O-methyladenosine-3'-phosphate
  modified_base 13: mod_base = OTHER; note = 2'-deoxy-2'-fluoroguanosine-3'-phosphate
  modified_base 14: mod_base = OTHER; note = 2'-O-methyluridine-3'-phosphate
  modified_base 15: mod_base = OTHER; note = 2'-O-methyladenosine-3'-phosphate
  modified_base 16: mod_base = OTHER; note = 2'-O-methyluridine-3'-phosphate
  modified_base 17: mod_base = OTHER; note = 2'-deoxy-2'-fluorouridine-3'-phosphate
  modified_base 18: mod_base = OTHER; note = 2'-deoxy-2'-fluorocytidine-3'-phosphate
  modified_base 19: mod_base = OTHER; note = 2'-deoxy-2'-fluorocytidine-3'-phosphate
  modified_base 20: mod_base = OTHER; note = 2'-O-methyladenosine-3'-phosphorothioate
  modified_base 21: mod_base = OTHER; note = 2'-deoxy-2'-fluorouridine
atgtaaccaagagtattccat

SEQ ID NO: 205 - RNA, 21 nt, synthetic construct
  source 1..21: mol_type = other RNA
  modified_base 1: mod_base = OTHER; note = 2'-deoxy-2'-fluoroadenosine-3'-phosphate
  modified_base 2: mod_base = OTHER; note = 2'-O-methyluridine-3'-phosphate
  modified_base 3: mod_base = OTHER; note = 2'-deoxy-2'-fluoroguanosine-3'-phosphate
  modified_base 4: mod_base = OTHER; note = 2'-O-methyluridine-3'-phosphate
  modified_base 5: mod_base = OTHER; note = 2'-deoxy-2'-fluoroadenosine-3'-phosphate
  modified_base 6: mod_base = OTHER; note = 2'-O-methyladenosine-3'-phosphate
  modified_base 7: mod_base = OTHER; note = 2'-deoxy-2'-fluorocytidine-3'-phosphate
  modified_base 8: mod_base = OTHER; note = 2'-O-methylcytidine-3'-phosphate
  modified_base 9: mod_base = OTHER; note = 2'-deoxy-2'-fluoroadenosine-3'-phosphate
  modified_base 10: mod_base = OTHER; note = 2'-O-methyladenosine-3'-phosphate
  modified_base 11: mod_base = OTHER; note = 2'-deoxy-2'-fluoroguanosine-3'-phosphate
  modified_base 12: mod_base = OTHER; note = 2'-O-methyladenosine-3'-phosphate
  modified_base 13: mod_base = OTHER; note = 2'-O-methylguanosine-3'-phosphate
  modified_base 14: mod_base = OTHER; note = 2'-O-methyluridine-3'-phosphate
  modified_base 15: mod_base = OTHER; note = 2'-deoxy-2'-fluoroadenosine-3'-phosphate
  modified_base 16: mod_base = OTHER; note = 2'-O-methyluridine-3'-phosphate
  modified_base 17: mod_base = OTHER; note = 2'-deoxy-2'-fluorouridine-3'-phosphate
  modified_base 18: mod_base = OTHER; note = 2'-O-methylcytidine-3'-phosphate
  modified_base 19: mod_base = OTHER; note = 2'-deoxy-2'-fluorocytidine-3'-phosphate
  modified_base 20: mod_base = OTHER; note = 2'-deoxy-2'-fluoroadenosine-3'-phosphorothioate
  modified_base 21: mod_base = OTHER; note = 2'-deoxy-2'-fluorouridine
atgtaaccaagagtattccat

SEQ ID NO: 206 - RNA, 21 nt, synthetic construct
  source 1..21: mol_type = other RNA
  modified_base 1: mod_base = OTHER; note = 2'-O-methyladenosine-3'-phosphate
  modified_base 2: mod_base = OTHER; note = 2'-O-methyluridine-3'-phosphate
  modified_base 3: mod_base = OTHER; note = 2'-O-methylguanosine-3'-phosphate
  modified_base 4: mod_base = OTHER; note = 2'-O-methyluridine-3'-phosphate
  modified_base 5: mod_base = OTHER; note = 2'-deoxy-2'-fluoroadenosine-3'-phosphate
  modified_base 6: mod_base = OTHER; note = 2'-O-methyladenosine-3'-phosphate
  modified_base 7: mod_base = OTHER; note = 2'-deoxy-2'-fluorocytidine-3'-phosphate
  modified_base 8: mod_base = OTHER; note = 2'-O-methylcytidine-3'-phosphate
  modified_base 9: mod_base = OTHER; note = 2'-deoxy-2'-fluoroadenosine-3'-phosphate
  modified_base 10: mod_base = OTHER; note = 2'-O-methyladenosine-3'-phosphate
  modified_base 11: mod_base = OTHER; note = 2'-deoxy-2'-fluoroguanosine-3'-phosphate
  modified_base 12: mod_base = OTHER; note = 2'-O-methyladenosine-3'-phosphate
  modified_base 13: mod_base = OTHER; note = 2'-deoxy-2'-fluoroguanosine-3'-phosphate
  modified_base 14: mod_base = OTHER; note = 2'-O-methyluridine-3'-phosphate
  modified_base 15: mod_base = OTHER; note = 2'-deoxy-2'-fluoroadenosine-3'-phosphate
  modified_base 16: mod_base = OTHER; note = 2'-O-methyluridine-3'-phosphate
  modified_base 17: mod_base = OTHER; note = 2'-deoxy-2'-fluorouridine-3'-phosphate
  modified_base 18: mod_base = OTHER; note = 2'-O-methylcytidine-3'-phosphate
  modified_base 19: mod_base = OTHER; note = 2'-deoxy-2'-fluorocytidine-3'-phosphate
  modified_base 20: mod_base = OTHER; note = 2'-O-methyladenosine-3'-phosphorothioate
  modified_base 21: mod_base = OTHER; note = 2'-O-methyluridine
atgtaaccaagagtattccat

SEQ ID NO: 207 - RNA, 21 nt, synthetic construct
  source 1..21: mol_type = other RNA
  modified_base 1: mod_base = OTHER; note = 2'-deoxy-2'-fluoroadenosine-3'-phosphate
  modified_base 2: mod_base = OTHER; note = 2'-O-methyluridine-3'-phosphate
  modified_base 3: mod_base = OTHER; note = 2'-deoxy-2'-fluoroguanosine-3'-phosphate
  modified_base 4: mod_base = OTHER; note = 2'-O-methyluridine-3'-phosphate
  modified_base 5: mod_base = OTHER; note = 2'-deoxy-2'-fluoroadenosine-3'-phosphate
  modified_base 6: mod_base = OTHER; note = 2'-O-methyladenosine-3'-phosphate
  modified_base 7: mod_base = OTHER; note = 2'-deoxy-2'-fluorocytidine-3'-phosphate
  modified_base 8: mod_base = OTHER; note = 2'-O-methylcytidine-3'-phosphate
  modified_base 9: mod_base = OTHER; note = 2'-deoxy-2'-fluoroadenosine-3'-phosphate
  modified_base 10: mod_base = OTHER; note = 2'-O-methyladenosine-3'-phosphate
  modified_base 11: mod_base = OTHER; note = 2'-deoxy-2'-fluoroguanosine-3'-phosphate
  modified_base 12: mod_base = OTHER; note = 2'-O-methyladenosine-3'-phosphate
  modified_base 13: mod_base = OTHER; note = 2'-deoxy-2'-fluoroguanosine-3'-phosphate
  modified_base 14: mod_base = OTHER; note = 2'-O-methyluridine-3'-phosphate
  modified_base 15: mod_base = OTHER; note = 2'-O-methyladenosine-3'-phosphate
  modified_base 16: mod_base = OTHER; note = 2'-O-methyluridine-3'-phosphate
  modified_base 17: mod_base = OTHER; note = 2'-deoxy-2'-fluorouridine-3'-phosphate
  modified_base 18: mod_base = OTHER; note = 2'-O-methylcytidine-3'-phosphate
  modified_base 19: mod_base = OTHER; note = 2'-deoxy-2'-fluorocytidine-3'-phosphate
  modified_base 20: mod_base = OTHER; note = 2'-deoxy-2'-fluoroadenosine-3'-phosphorothioate
  modified_base 21: mod_base = OTHER; note = 2'-deoxy-2'-fluorouridine
atgtaaccaagagtattccat

SEQ ID NO: 208 - RNA, 21 nt, synthetic construct
  source 1..21: mol_type = other RNA
  modified_base 1: mod_base = OTHER; note = 2'-O-methyladenosine-3'-phosphate
  modified_base 2: mod_base = OTHER; note = 2'-O-methyluridine-3'-phosphate
  modified_base 3: mod_base = OTHER; note = 2'-O-methylguanosine-3'-phosphate
  modified_base 4: mod_base = OTHER; note = 2'-O-methyluridine-3'-phosphate
  modified_base 5: mod_base = OTHER; note = 2'-O-methyladenosine-3'-phosphate
  modified_base 6: mod_base = OTHER; note = 2'-O-methyladenosine-3'-phosphate
  modified_base 7: mod_base = OTHER; note = 2'-deoxy-2'-fluorocytidine-3'-phosphate
  modified_base 8: mod_base = OTHER; note = 2'-O-methylcytidine-3'-phosphate
  modified_base 9: mod_base = OTHER; note = 2'-deoxy-2'-fluoroadenosine-3'-phosphate
  modified_base 10: mod_base = OTHER; note = 2'-O-methyladenosine-3'-phosphate
  modified_base 11: mod_base = OTHER; note = 2'-deoxy-2'-fluoroguanosine-3'-phosphate
  modified_base 12: mod_base = OTHER; note = 2'-O-methyladenosine-3'-phosphate
  modified_base 13: mod_base = OTHER; note = 2'-deoxy-2'-fluoroguanosine-3'-phosphate
  modified_base 14: mod_base = OTHER; note = 2'-O-methyluridine-3'-phosphate
  modified_base 15: mod_base = OTHER; note = 2'-deoxy-2'-fluoroadenosine-3'-phosphate
  modified_base 16: mod_base = OTHER; note = 2'-O-methyluridine-3'-phosphate
  modified_base 17: mod_base = OTHER; note = 2'-deoxy-2'-fluorouridine-3'-phosphate
  modified_base 18: mod_base = OTHER; note = 2'-O-methylcytidine-3'-phosphate
  modified_base 19: mod_base = OTHER; note = 2'-deoxy-2'-fluorocytidine-3'-phosphate
  modified_base 20: mod_base = OTHER; note = 2'-O-methyladenosine-3'-phosphorothioate
  modified_base 21: mod_base = OTHER; note = 2'-deoxy-2'-fluorouridine
atgtaaccaagagtattccat

SEQ ID NO: 209 - RNA, 21 nt, synthetic construct
  source 1..21: mol_type = other RNA
  modified_base 1: mod_base = OTHER; note = 2'-deoxy-2'-fluoroadenosine-3'-phosphate
  modified_base 2: mod_base = OTHER; note = 2'-O-methyluridine-3'-phosphate
  modified_base 3: mod_base = OTHER; note = 2'-deoxy-2'-fluoroguanosine-3'-phosphate
  modified_base 4: mod_base = OTHER; note = 2'-O-methyluridine-3'-phosphate
  modified_base 5: mod_base = OTHER; note = 2'-deoxy-2'-fluoroadenosine-3'-phosphate
  modified_base 6: mod_base = OTHER; note = 2'-O-methyladenosine-3'-phosphate
  modified_base 7: mod_base = OTHER; note = 2'-deoxy-2'-fluorocytidine-3'-phosphate
  modified_base 8: mod_base = OTHER; note = 2'-O-methylcytidine-3'-phosphate
  modified_base 9: mod_base = OTHER; note = 2'-deoxy-2'-fluoroadenosine-3'-phosphate
  modified_base 10: mod_base = OTHER; note = 2'-O-methyladenosine-3'-phosphate
  modified_base 11: mod_base = OTHER; note = 2'-deoxy-2'-fluoroguanosine-3'-phosphate
  modified_base 12: mod_base = OTHER; note = 2'-O-methyladenosine-3'-phosphate
  modified_base 13: mod_base = OTHER; note = 2'-deoxy-2'-fluoroguanosine-3'-phosphate
  modified_base 14: mod_base = OTHER; note = 2'-O-methyluridine-3'-phosphate
  modified_base 15: mod_base = OTHER; note = 2'-deoxy-2'-fluoroadenosine-3'-phosphate
  modified_base 16: mod_base = OTHER; note = 2'-O-methyluridine-3'-phosphate
  modified_base 17: mod_base = OTHER; note = 2'-deoxy-2'-fluorouridine-3'-phosphate
  modified_base 18: mod_base = OTHER; note = 2'-O-methylcytidine-3'-phosphate
  modified_base 19: mod_base = OTHER; note = 2'-deoxy-2'-fluorocytidine-3'-phosphate
  modified_base 20: mod_base = OTHER; note = 2'-O-methyladenosine-3'-phosphorothioate
  modified_base 21: mod_base = OTHER; note = 2'-deoxy-2'-fluorouridine
atgtaaccaagagtattccat

SEQ ID NO: 210 - DNA, 21 bp, synthetic construct
  source 1..21: mol_type = other DNA
  modified_base 1: mod_base = OTHER; note = 2'-deoxy-2'-fluoroadenosine-3'-phosphate
  modified_base 2: mod_base = OTHER; note = 2'-O-methyluridine-3'-phosphate
  modified_base 3: mod_base = OTHER; note = 2'-deoxy-2'-fluoroguanosine-3'-phosphate
  modified_base 4: mod_base = OTHER; note = 2'-O-methyluridine-3'-phosphate
  modified_base 5: mod_base = OTHER; note = 2'-deoxy-2'-fluoroadenosine-3'-phosphate
  modified_base 6: mod_base = OTHER; note = 2'-O-methyladenosine-3'-phosphate
  modified_base 7: mod_base = OTHER; note = 2'-deoxy-2'-fluorocytidine-3'-phosphate
  modified_base 8: mod_base = OTHER; note = 2'-O-methylcytidine-3'-phosphate
  modified_base 9: mod_base = OTHER; note = 2'-deoxy-2'-fluoroadenosine-3'-phosphate
  modified_base 10: mod_base = OTHER; note = 2'-O-methyladenosine-3'-phosphate
  modified_base 11: mod_base = OTHER; note = 2'-deoxy-2'-fluoroguanosine-3'-phosphate
  modified_base 12: mod_base = OTHER; note = 2'-O-methyladenosine-3'-phosphate
  modified_base 13: mod_base = OTHER; note = 2'-deoxy-2'-fluoroguanosine-3'-phosphate
  modified_base 18: mod_base = OTHER; note = 2'-O-methylcytidine-3'-phosphate
  modified_base 19: mod_base = OTHER; note = 2'-deoxy-2'-fluorocytidine-3'-phosphate
  modified_base 20: mod_base = OTHER; note = 2'-O-methyladenosine-3'-phosphorothioate
  modified_base 21: mod_base = OTHER; note = 2'-deoxy-2'-fluorouridine
  misc_feature 1..13: note = RNA
  misc_feature 18..21: note = RNA
  misc_feature 14..17: note = DNA
atgtaaccaagagtattccat

SEQ ID NO: 211 - RNA, 21 nt, synthetic construct
  source 1..21: mol_type = other RNA
  modified_base 1: mod_base = OTHER; note = 2'-deoxy-2'-fluoroadenosine-3'-phosphate
  modified_base 2: mod_base = OTHER; note = 2'-O-methyluridine-3'-phosphate
  modified_base 3: mod_base = OTHER; note = 2'-deoxy-2'-fluoroguanosine-3'-phosphate
  modified_base 4: mod_base = OTHER; note = 2'-O-methyluridine-3'-phosphate
  modified_base 5: mod_base = OTHER; note = 2'-deoxy-2'-fluoroadenosine-3'-phosphate
  modified_base 6: mod_base = OTHER; note = 2'-O-methyladenosine-3'-phosphate
  modified_base 7: mod_base = OTHER; note = 2'-deoxy-2'-fluorocytidine-3'-phosphate
  modified_base 8: mod_base = OTHER; note = 2'-O-methylcytidine-3'-phosphate
  modified_base 9: mod_base = OTHER; note = 2'-deoxy-2'-fluoroadenosine-3'-phosphate
  modified_base 10: mod_base = OTHER; note = 2'-O-methyladenosine-3'-phosphate
  modified_base 11: mod_base = OTHER; note = 2'-deoxy-2'-fluoroguanosine-3'-phosphate
  modified_base 12: mod_base = OTHER; note = 2'-O-methyladenosine-3'-phosphate
  modified_base 13: mod_base = OTHER; note = 2'-deoxy-2'-fluoroguanosine-3'-phosphate
  modified_base 14: mod_base = OTHER; note = 2'-O-methyluridine-3'-phosphate
  modified_base 15: mod_base = OTHER; note = 2'-deoxy-2'-fluoroadenosine-3'-phosphate
  modified_base 16: mod_base = OTHER; note = 2'-O-methyluridine-3'-phosphate
  modified_base 17: mod_base = OTHER; note = 2'-deoxy-2'-fluorouridine-3'-phosphate
  modified_base 18: mod_base = OTHER; note = 2'-O-methylcytidine-3'-phosphate
  modified_base 19: mod_base = OTHER; note = 2'-deoxy-2'-fluorocytidine-3'-phosphate
  modified_base 20: mod_base = OTHER; note = 2'-O-methyladenosine-3'-phosphorothioate
  modified_base 21: mod_base = OTHER; note = 2'-deoxy-2'-fluorouridine
atgtaaccaagagtattccat

SEQ ID NO: 212 - RNA, 21 nt, synthetic construct
  source 1..21: mol_type = other RNA
  modified_base 1: mod_base = OTHER; note = 2'-deoxy-2'-fluoroadenosine-3'-phosphate
  modified_base 2: mod_base = OTHER; note = 2'-O-methyluridine-3'-phosphate
  modified_base 3: mod_base = OTHER; note = 2'-deoxy-2'-fluoroguanosine-3'-phosphate
  modified_base 4: mod_base = OTHER; note = 2'-O-methyluridine-3'-phosphate
  modified_base 5: mod_base = OTHER; note = 2'-deoxy-2'-fluoroadenosine-3'-phosphate
  modified_base 6: mod_base = OTHER; note = 2'-O-methyladenosine-3'-phosphate
  modified_base 7: mod_base = OTHER; note = 2'-deoxy-2'-fluorocytidine-3'-phosphate
  modified_base 8: mod_base = OTHER; note = 2'-O-methylcytidine-3'-phosphate
  modified_base 9: mod_base = OTHER; note = 2'-deoxy-2'-fluoroadenosine-3'-phosphate
  modified_base 10: mod_base = OTHER; note = 2'-O-methyladenosine-3'-phosphate
  modified_base 11: mod_base = OTHER; note = 2'-deoxy-2'-fluoroguanosine-3'-phosphate
  modified_base 12: mod_base = OTHER; note = 2'-O-methyladenosine-3'-phosphate
  modified_base 13: mod_base = OTHER; note = 2'-deoxy-2'-fluoroguanosine-3'-phosphate
  modified_base 14: mod_base = OTHER; note = 2'-O-methyluridine-3'-phosphate
  modified_base 15: mod_base = OTHER; note = 2'-deoxy-2'-fluoroadenosine-3'-phosphate
  modified_base 16: mod_base = OTHER; note = 2'-O-methyluridine-3'-phosphate
  modified_base 17: mod_base = OTHER; note = 2'-deoxy-2'-fluorouridine-3'-phosphate
  modified_base 18: mod_base = OTHER; note = 2'-O-methylcytidine-3'-phosphate
  modified_base 19: mod_base = OTHER; note = 2'-deoxy-2'-fluorocytidine-3'-phosphate
  modified_base 20: mod_base = OTHER; note = 2'-O-methyladenosine-3'-phosphorothioate
  modified_base 21: mod_base = OTHER; note = 2'-deoxy-2'-fluorouridine
atgtaaccaagagtattccat

SEQ ID NO: 213 - RNA, 21 nt, synthetic construct
  source 1..21: mol_type = other RNA
  modified_base 1: mod_base = OTHER; note = 2'-deoxy-2'-fluoroadenosine-3'-phosphate
  modified_base 2: mod_base = OTHER; note = 2'-O-methyluridine-3'-phosphate
  modified_base 3: mod_base = OTHER; note = 2'-deoxy-2'-fluoroguanosine-3'-phosphate
  modified_base 4: mod_base = OTHER; note = 2'-O-methyluridine-3'-phosphate
  modified_base 5: mod_base = OTHER; note = 2'-deoxy-2'-fluoroadenosine-3'-phosphate
  modified_base 6: mod_base = OTHER; note = 2'-O-methyladenosine-3'-phosphate
  modified_base 7: mod_base = OTHER; note = 2'-deoxy-2'-fluorocytidine-3'-phosphate
  modified_base 8: mod_base = OTHER; note = 2'-O-methylcytidine-3'-phosphate
  modified_base 9: mod_base = OTHER; note = 2'-deoxy-2'-fluoroadenosine-3'-phosphate
  modified_base 10: mod_base = OTHER; note = 2'-O-methyladenosine-3'-phosphate
  modified_base 11: mod_base = OTHER; note = 2'-deoxy-2'-fluoroguanosine-3'-phosphate
  modified_base 12: mod_base = OTHER; note = 2'-O-methyladenosine-3'-phosphate
  modified_base 13: mod_base = OTHER; note = 2'-deoxy-2'-fluoroguanosine-3'-phosphate
  modified_base 14: mod_base = OTHER; note = 2'-O-methyluridine-3'-phosphate
  modified_base 15: mod_base = OTHER; note = 2'-deoxy-2'-fluoroadenosine-3'-phosphate
  modified_base 16: mod_base = OTHER; note = 2'-O-methyluridine-3'-phosphate
  modified_base 17: mod_base = OTHER; note = 2'-deoxy-2'-fluorouridine-3'-phosphate
  modified_base 18: mod_base = OTHER; note = 2'-O-methylcytidine-3'-phosphate
  modified_base 19: mod_base = OTHER; note = 2'-deoxy-2'-fluorocytidine-3'-phosphate
  modified_base 20: mod_base = OTHER; note = 2'-O-methyladenosine-3'-phosphorothioate
  modified_base 21: mod_base = OTHER; note = 2'-deoxy-2'-fluorouridine
atgtaaccaagagtattccat

SEQ ID NO: 214 - RNA, 21 nt, synthetic construct
  source 1..21: mol_type = other RNA
  modified_base 1: mod_base = OTHER; note = 2'-deoxy-2'-fluoroadenosine-3'-phosphate
  modified_base 2: mod_base = OTHER; note = 2'-O-methyluridine-3'-phosphate
  modified_base 3: mod_base = OTHER; note = 2'-O-methylguanosine-3'-phosphate
  modified_base 4: mod_base = OTHER; note = 2'-O-methyluridine-3'-phosphate
  modified_base 5: mod_base = OTHER; note = 2'-deoxy-2'-fluoroadenosine-3'-phosphate
  modified_base 6: mod_base = OTHER; note = 2'-O-methyladenosine-3'-phosphate
  modified_base 7: mod_base = OTHER; note = 2'-O-methylcytidine-3'-phosphate
  modified_base 8: mod_base = OTHER; note = 2'-O-methylcytidine-3'-phosphate
  modified_base 9: mod_base = OTHER; note = 2'-deoxy-2'-fluoroadenosine-3'-phosphate
  modified_base 10: mod_base = OTHER; note = 2'-O-methyladenosine-3'-phosphate
  modified_base 11: mod_base = OTHER; note = 2'-deoxy-2'-fluoroguanosine-3'-phosphate
  modified_base 12: mod_base = OTHER; note = 2'-O-methyladenosine-3'-phosphate
  modified_base 13: mod_base = OTHER; note = 2'-deoxy-2'-fluoroguanosine-3'-phosphate
  modified_base 14: mod_base = OTHER; note = 2'-O-methyluridine-3'-phosphate
  modified_base 15: mod_base = OTHER; note = 2'-deoxy-2'-fluoroadenosine-3'-phosphate
  modified_base 16: mod_base = OTHER; note = 2'-O-methyluridine-3'-phosphate
  modified_base 17: mod_base = OTHER; note = 2'-deoxy-2'-fluorouridine-3'-phosphate
  modified_base 18: mod_base = OTHER; note = 2'-O-methylcytidine-3'-phosphate
  modified_base 19: mod_base = OTHER; note = 2'-deoxy-2'-fluorocytidine-3'-phosphate
  modified_base 20: mod_base = OTHER; note = 2'-O-methyladenosine-3'-phosphorothioate
  modified_base 21: mod_base = OTHER; note = 2'-deoxy-2'-fluorouridine
atgtaaccaagagtattccat

SEQ ID NO: 215 - RNA, 21 nt, synthetic construct
  source 1..21: mol_type = other RNA
  modified_base 1: mod_base = OTHER; note = 2'-deoxy-2'-fluoroadenosine-3'-phosphate
  modified_base 2: mod_base = OTHER; note = 2'-O-methyluridine-3'-phosphate
  modified_base 3: mod_base = OTHER; note = 2'-deoxy-2'-fluoroguanosine-3'-phosphate
  modified_base 4: mod_base = OTHER; note = 2'-O-methyluridine-3'-phosphate
  modified_base 5: mod_base = OTHER; note = 2'-deoxy-2'-fluoroadenosine-3'-phosphate
  modified_base 6: mod_base = OTHER; note = 2'-O-methyladenosine-3'-phosphate
  modified_base 7: mod_base = OTHER; note = 2'-deoxy-2'-fluorocytidine-3'-phosphate
  modified_base 8: mod_base = OTHER; note = 2'-O-methylcytidine-3'-phosphate
  modified_base 9: mod_base = OTHER; note = 2'-deoxy-2'-fluoroadenosine-3'-phosphate
  modified_base 10: mod_base = OTHER; note = 2'-O-methyladenosine-3'-phosphate
  modified_base 11: mod_base = OTHER; note = 2'-deoxy-2'-fluoroguanosine-3'-phosphate
  modified_base 12: mod_base = OTHER; note = 2'-O-methyladenosine-3'-phosphate
  modified_base 13: mod_base = OTHER; note = 2'-deoxy-2'-fluoroguanosine-3'-phosphate
  modified_base 14: mod_base = OTHER; note = 2'-O-methyluridine-3'-phosphate
  modified_base 15: mod_base = OTHER; note = 2'-deoxy-2'-fluoroadenosine-3'-phosphate
  modified_base 16: mod_base = OTHER; note = 2'-O-methyluridine-3'-phosphate
  modified_base 17: mod_base = OTHER; note = 2'-deoxy-2'-fluorouridine-3'-phosphate
  modified_base 18: mod_base = OTHER; note = 2'-O-methylcytidine-3'-phosphate
  modified_base 19: mod_base = OTHER; note = 2'-deoxy-2'-fluorocytidine-3'-phosphate
  modified_base 20: mod_base = OTHER; note = 2'-O-methyladenosine-3'-phosphorothioate
  modified_base 21: mod_base = OTHER; note = 2'-deoxy-2'-fluorouridine
atgtaaccaagagtattccat

SEQ ID NO: 216 - RNA, 21 nt, synthetic construct
  source 1..21: mol_type = other RNA
  modified_base 1: mod_base = OTHER; note = 2'-deoxy-2'-fluoroadenosine-3'-phosphate
  modified_base 2: mod_base = OTHER; note = 2'-O-methyluridine-3'-phosphate
  modified_base 3: mod_base = OTHER; note = 2'-deoxy-2'-fluoroguanosine-3'-phosphate
  modified_base 4: mod_base = OTHER; note = 2'-O-methyluridine-3'-phosphate
  modified_base 5: mod_base = OTHER; note = 2'-deoxy-2'-fluoroadenosine-3'-phosphate
  modified_base 6: mod_base = OTHER; note = 2'-O-methyladenosine-3'-phosphate
  modified_base 7: mod_base = OTHER; note = 2'-deoxy-2'-fluorocytidine-3'-phosphate
  modified_base 8: mod_base = OTHER; note = 2'-O-methylcytidine-3'-phosphate
  modified_base 9: mod_base = OTHER; note = 2'-deoxy-2'-fluoroadenosine-3'-phosphate
  modified_base 10: mod_base = OTHER; note = 2'-O-methyladenosine-3'-phosphate
  modified_base 11: mod_base = OTHER; note = 2'-deoxy-2'-fluoroguanosine-3'-phosphate
  modified_base 12: mod_base = OTHER; note = 2'-O-methyladenosine-3'-phosphate
  modified_base 13: mod_base = OTHER; note = 2'-deoxy-2'-fluoroguanosine-3'-phosphate
  modified_base 14: mod_base = OTHER; note = 2'-O-methyluridine-3'-phosphate
  modified_base 15: mod_base = OTHER; note = 2'-deoxy-2'-fluoroadenosine-3'-phosphate
  modified_base 16: mod_base = OTHER; note = 2'-O-methyluridine-3'-phosphate
  modified_base 17: mod_base = OTHER; note = 2'-deoxy-2'-fluorouridine-3'-phosphate
  modified_base 18: mod_base = OTHER; note = 2'-O-methylcytidine-3'-phosphate
  modified_base 19: mod_base = OTHER; note = 2'-deoxy-2'-fluorocytidine-3'-phosphate
  modified_base 20: mod_base = OTHER; note = 2'-O-methyladenosine-3'-phosphorothioate
  modified_base 21: mod_base = OTHER; note = 2'-deoxy-2'-fluorouridine
atgtaaccaagagtattccat

SEQ ID NO: 217 - RNA, 21 nt, synthetic construct
  source 1..21: mol_type = other RNA
  modified_base 1: mod_base = OTHER; note = 2'-O-methyladenosine-3'-phosphate
  modified_base 2: mod_base = OTHER; note = 2'-O-methyluridine-3'-phosphate
  modified_base 3: mod_base = OTHER; note = 2'-O-methylguanosine-3'-phosphate
  modified_base 4: mod_base = OTHER; note = 2'-O-methyluridine-3'-phosphate
  modified_base 5: mod_base = OTHER; note = 2'-O-methyladenosine-3'-phosphate
  modified_base 6: mod_base = OTHER; note = 2'-O-methyladenosine-3'-phosphate
  modified_base 7: mod_base = OTHER; note = 2'-O-methylcytidine-3'-phosphate
  modified_base 8: mod_base = OTHER; note = 2'-O-methylcytidine-3'-phosphate
  modified_base 9: mod_base = OTHER; note = 2'-O-methyladenosine-3'-phosphate
  modified_base 10: mod_base = OTHER; note = 2'-O-methyladenosine-3'-phosphate
  modified_base 11: mod_base = OTHER; note = 2'-deoxy-2'-fluoroguanosine-3'-phosphate
  modified_base 12: mod_base = OTHER; note = 2'-O-methyladenosine-3'-phosphate
  modified_base 13: mod_base = OTHER; note = 2'-deoxy-2'-fluoroguanosine-3'-phosphate
  modified_base 14: mod_base = OTHER; note = 2'-O-methyluridine-3'-phosphate
  modified_base 15: mod_base = OTHER; note = 2'-deoxy-2'-fluoroadenosine-3'-phosphate
  modified_base 16: mod_base = OTHER; note = 2'-O-methyluridine-3'-phosphate
  modified_base 17: mod_base = OTHER; note = 2'-deoxy-2'-fluorouridine-3'-phosphate
  modified_base 18: mod_base = OTHER; note = 2'-O-methylcytidine-3'-phosphate
  modified_base 19: mod_base = OTHER; note = 2'-deoxy-2'-fluorocytidine-3'-phosphate
  modified_base 20: mod_base = OTHER; note = 2'-O-methyladenosine-3'-phosphorothioate
  modified_base 21: mod_base = OTHER; note = 2'-deoxy-2'-fluorouridine
atgtaaccaagagtattccat

SEQ ID NO: 218 - DNA, 21 bp, synthetic construct
  source 1..21: mol_type = other DNA
  modified_base 1: mod_base = OTHER; note = 2'-deoxy-2'-fluoroadenosine-3'-phosphate
  modified_base 2: mod_base = OTHER; note = 2'-O-methyluridine-3'-phosphate
  modified_base 3: mod_base = OTHER; note = 2'-deoxy-2'-fluoroguanosine-3'-phosphate
  modified_base 4: mod_base = OTHER; note = 2'-O-methyluridine-3'-phosphate
  modified_base 5: mod_base = OTHER; note = 2'-deoxy-2'-fluoroadenosine-3'-phosphate
  modified_base 6: mod_base = OTHER; note = 2'-O-methyladenosine-3'-phosphate
  modified_base 7: mod_base = OTHER; note = 2'-deoxy-2'-fluorocytidine-3'-phosphate
  modified_base 8: mod_base = OTHER; note = 2'-O-methylcytidine-3'-phosphate
  modified_base 9: mod_base = OTHER; note = 2'-deoxy-2'-fluoroadenosine-3'-phosphate
  modified_base 10: mod_base = OTHER; note = 2'-O-methyladenosine-3'-phosphate
  modified_base 11: mod_base = OTHER; note = 2'-deoxy-2'-fluoroguanosine-3'-phosphate
  modified_base 12: mod_base = OTHER; note = 2'-O-methyladenosine-3'-phosphate
  modified_base 13: mod_base = OTHER; note = 2'-deoxy-2'-fluoroguanosine-3'-phosphate
  modified_base 14: mod_base = OTHER; note = 2'-O-methyluridine-3'-phosphate
  modified_base 15: mod_base = OTHER; note = 2'-deoxy-2'-fluoroadenosine-3'-phosphate
  modified_base 16: mod_base = OTHER; note = 2'-O-methyluridine-3'-phosphate
  modified_base 20: mod_base = OTHER; note = 2'-deoxyadenosine-3'-phosphorothioate
  modified_base 21: mod_base = OTHER; note = 2'-deoxy-2'-fluorouridine
  misc_feature 1..16: note = RNA
  misc_feature 21: note = RNA
  misc_feature 17..20: note = DNA
atgtaaccaagagtattccat

SEQ ID NO: 219 - RNA, 21 nt, synthetic construct
  source 1..21: mol_type = other RNA
  modified_base 1: mod_base = OTHER; note = 2'-O-methyladenosine-3'-phosphate
  modified_base 2: mod_base = OTHER; note = 2'-deoxy-2'-fluorouridine-3'-phosphate
  modified_base 3: mod_base = OTHER; note = 2'-O-methylguanosine-3'-phosphate
  modified_base 4: mod_base = OTHER; note = 2'-deoxy-2'-fluorouridine-3'-phosphate
  modified_base 5: mod_base = OTHER; note = 2'-O-methyladenosine-3'-phosphate
  modified_base 6: mod_base = OTHER; note = 2'-deoxy-2'-fluoroadenosine-3'-phosphate
  modified_base 7: mod_base = OTHER; note = 2'-O-methylcytidine-3'-phosphate
  modified_base 8: mod_base = OTHER; note = 2'-deoxy-2'-fluorocytidine-3'-phosphate
  modified_base 9: mod_base = OTHER; note = 2'-O-methyladenosine-3'-phosphate
  modified_base 10: mod_base = OTHER; note = 2'-deoxy-2'-fluoroadenosine-3'-phosphate
  modified_base 11: mod_base = OTHER; note = 2'-O-methylguanosine-3'-phosphate
  modified_base 12: mod_base = OTHER; note = 2'-deoxy-2'-fluoroadenosine-3'-phosphate
  modified_base 13: mod_base = OTHER; note = 2'-O-methylguanosine-3'-phosphate
  modified_base 14: mod_base = OTHER; note = 2'-deoxy-2'-fluorouridine-3'-phosphate
  modified_base 15: mod_base = OTHER; note = 2'-O-methyladenosine-3'-phosphate
  modified_base 16: mod_base = OTHER; note = 2'-deoxy-2'-fluorouridine-3'-phosphate
  modified_base 17: mod_base = OTHER; note = 2'-O-methyluridine-3'-phosphate
  modified_base 18: mod_base = OTHER; note = 2'-deoxy-2'-fluorocytidine-3'-phosphate
  modified_base 19: mod_base = OTHER; note = 2'-O-methylcytidine-3'-phosphate
  modified_base 20: mod_base = OTHER; note = 2'-deoxy-2'-fluoroadenosine-3'-phosphorothioate
  modified_base 21: mod_base = OTHER; note = 2'-O-methyluridine
atgtaaccaagagtattccat

SEQ ID NO: 220 - DNA, 21 bp, synthetic construct
  source 1..21: mol_type = other DNA
  modified_base 1: mod_base = OTHER; note = 2'-deoxy-2'-fluoroadenosine-3'-phosphate
  modified_base 2: mod_base = OTHER; note = 2'-O-methyluridine-3'-phosphate
  modified_base 3: mod_base = OTHER; note = 2'-deoxy-2'-fluoroguanosine-3'-phosphate
  modified_base 4: mod_base = OTHER; note = 2'-O-methyluridine-3'-phosphate
  modified_base 5: mod_base = OTHER; note = 2'-deoxy-2'-fluoroadenosine-3'-phosphate
  modified_base 6: mod_base = OTHER; note = 2'-O-methyladenosine-3'-phosphate
  modified_base 7: mod_base = OTHER; note = 2'-deoxy-2'-fluorocytidine-3'-phosphate
  modified_base 8: mod_base = OTHER; note = 2'-O-methylcytidine-3'-phosphate
  modified_base 9: mod_base = OTHER; note = 2'-deoxy-2'-fluoroadenosine-3'-phosphate
  modified_base 10: mod_base = OTHER; note = 2'-O-methyladenosine-3'-phosphate
  modified_base 11: mod_base = OTHER; note = 2'-deoxy-2'-fluoroguanosine-3'-phosphate
  modified_base 12: mod_base = OTHER; note = 2'-O-methyladenosine-3'-phosphate
  modified_base 13: mod_base = OTHER; note = 2'-deoxy-2'-fluoroguanosine-3'-phosphate
  modified_base 14: mod_base = OTHER; note = 2'-O-methyluridine-3'-phosphate
  modified_base 15: mod_base = OTHER; note = 2'-deoxy-2'-fluoroadenosine-3'-phosphate
  modified_base 20: mod_base = OTHER; note = 2'-O-methyladenosine-3'-phosphorothioate
  modified_base 21: mod_base = OTHER; note = 2'-deoxy-2'-fluorouridine
  misc_feature 1..15: note = RNA
  misc_feature 20..21: note = RNA
  misc_feature 16..19: note = DNA
atgtaaccaagagtattccat

SEQ ID NO: 221 - RNA, 21 nt, synthetic construct
  source 1..21: mol_type = other RNA
  modified_base 1: mod_base = OTHER; note = 2'-deoxy-2'-fluoroadenosine-3'-phosphate
  modified_base 2: mod_base = OTHER; note = 2'-O-methyluridine-3'-phosphate
  modified_base 3: mod_base = OTHER; note = 2'-deoxy-2'-fluoroguanosine-3'-phosphate
  modified_base 4: mod_base = OTHER; note = 2'-O-methyluridine-3'-phosphate
  modified_base 5: mod_base = OTHER; note = 2'-deoxy-2'-fluoroadenosine-3'-phosphate
  modified_base 6: mod_base = OTHER; note = 2'-O-methyladenosine-3'-phosphate
  modified_base 7: mod_base = OTHER; note = 2'-O-methylcytidine-3'-phosphate
  modified_base 8: mod_base = OTHER; note = 2'-O-methylcytidine-3'-phosphate
  modified_base 9: mod_base = OTHER; note = 2'-O-methyladenosine-3'-phosphate
  modified_base 10: mod_base = OTHER; note = 2'-O-methyladenosine-3'-phosphate
  modified_base 11: mod_base = OTHER; note = 2'-O-methylguanosine-3'-phosphate
  modified_base 12: mod_base = OTHER; note = 2'-O-methyladenosine-3'-phosphate
  modified_base 13: mod_base = OTHER; note = 2'-O-methylguanosine-3'-phosphate
  modified_base 14: mod_base = OTHER; note = 2'-O-methyluridine-3'-phosphate
  modified_base 15: mod_base = OTHER; note = 2'-deoxy-2'-fluoroadenosine-3'-phosphate
  modified_base 16: mod_base = OTHER; note = 2'-O-methyluridine-3'-phosphate
  modified_base 17: mod_base = OTHER; note = 2'-deoxy-2'-fluorouridine-3'-phosphate
  modified_base 18: mod_base = OTHER; note = 2'-O-methylcytidine-3'-phosphate
  modified_base 19: mod_base = OTHER; note = 2'-deoxy-2'-fluorocytidine-3'-phosphate
  modified_base 20: mod_base = OTHER; note = 2'-O-methyladenosine-3'-phosphorothioate
  modified_base 21: mod_base = OTHER; note = 2'-deoxy-2'-fluorouridine
atgtaaccaagagtattccat

SEQ ID NO: 222 - RNA, 21 nt, synthetic construct
  source 1..21: mol_type = other RNA
  modified_base 1: mod_base = OTHER; note = 2'-deoxy-2'-fluoroadenosine-3'-phosphate
  modified_base 2: mod_base = OTHER; note = 2'-O-methyluridine-3'-phosphate
  modified_base 3: mod_base = OTHER; note = 2'-deoxy-2'-fluoroguanosine-3'-phosphate
  modified_base 4: mod_base = OTHER; note = 2'-O-methyluridine-3'-phosphate
  modified_base 5: mod_base = OTHER; note = 2'-deoxy-2'-fluoroadenosine-3'-phosphate
  modified_base 6: mod_base = OTHER; note = 2'-O-methyladenosine-3'-phosphate
  modified_base 7: mod_base = OTHER; note = 2'-O-methylcytidine-3'-phosphate
  modified_base 8: mod_base = OTHER; note = 2'-O-methylcytidine-3'-phosphate
  modified_base 9: mod_base = OTHER; note = 2'-O-methyladenosine-3'-phosphate
  modified_base 10: mod_base = OTHER; note = 2'-O-methyladenosine-3'-phosphate
  modified_base 11: mod_base = OTHER; note = 2'-O-methylguanosine-3'-phosphate
  modified_base 12: mod_base = OTHER; note = 2'-O-methyladenosine-3'-phosphate
  modified_base 13: mod_base = OTHER; note = 2'-O-methylguanosine-3'-phosphate
  modified_base 14: mod_base = OTHER; note = 2'-O-methyluridine-3'-phosphate
  modified_base 15: mod_base = OTHER; note = 2'-deoxy-2'-fluoroadenosine-3'-phosphate
  modified_base 16: mod_base = OTHER; note = 2'-O-methyluridine-3'-phosphate
  modified_base 17: mod_base = OTHER; note = 2'-deoxy-2'-fluorouridine-3'-phosphate
  modified_base 18: mod_base = OTHER; note = 2'-O-methylcytidine-3'-phosphate
  modified_base 19: mod_base = OTHER; note = 2'-deoxy-2'-fluorocytidine-3'-phosphate
  modified_base 20: mod_base = OTHER; note = 2'-O-methyladenosine-3'-phosphorothioate
  modified_base 21: mod_base = OTHER; note = 2'-deoxy-2'-fluorouridine
atgtaaccaagagtattccat

SEQ ID NO: 223 - RNA, 21 nt, synthetic construct
  source 1..21: mol_type = other RNA
  modified_base 1: mod_base = OTHER; note = 2'-deoxy-2'-fluoroadenosine-3'-phosphate
  modified_base 2: mod_base = OTHER; note = 2'-deoxy-2'-fluorouridine-3'-phosphate
  modified_base 3: mod_base = OTHER; note = 2'-O-methylguanosine-3'-phosphate
  modified_base 4: mod_base = OTHER; note = 2'-O-methyluridine-3'-phosphate
  modified_base 5: mod_base = OTHER; note = 2'-deoxy-2'-fluoroadenosine-3'-phosphate
  modified_base 6: mod_base = OTHER; note = 2'-deoxy-2'-fluoroadenosine-3'-phosphate
  modified_base 7: mod_base = OTHER; note = 2'-O-methylcytidine-3'-phosphate
  modified_base 8: mod_base = OTHER; note = 2'-O-methylcytidine-3'-phosphate
  modified_base 9: mod_base = OTHER; note = 2'-deoxy-2'-fluoroadenosine-3'-phosphate
  modified_base 10: mod_base = OTHER; note = 2'-deoxy-2'-fluoroadenosine-3'-phosphate
  modified_base 11: mod_base = OTHER; note = 2'-O-methylguanosine-3'-phosphate
  modified_base 12: mod_base = OTHER; note = 2'-O-methyladenosine-3'-phosphate
  modified_base 13: mod_base = OTHER; note = 2'-deoxy-2'-fluoroguanosine-3'-phosphate
  modified_base 14: mod_base = OTHER; note = 2'-deoxy-2'-fluorouridine-3'-phosphate
  modified_base 15: mod_base = OTHER; note = 2'-O-methyladenosine-3'-phosphate
  modified_base 16: mod_base = OTHER; note = 2'-O-methyluridine-3'-phosphate
  modified_base 17: mod_base = OTHER; note = 2'-deoxy-2'-fluorouridine-3'-phosphate
  modified_base 18: mod_base = OTHER; note = 2'-deoxy-2'-fluorocytidine-3'-phosphate
  modified_base 19: mod_base = OTHER; note = 2'-O-methylcytidine-3'-phosphate
  modified_base 20: mod_base = OTHER; note = 2'-O-methyladenosine-3'-phosphorothioate
  modified_base 21: mod_base = OTHER; note = 2'-deoxy-2'-fluorouridine
atgtaaccaagagtattccat

SEQ ID NO: 224 - RNA, 21 nt, synthetic construct
  source 1..21: mol_type = other RNA
  modified_base 1: mod_base = OTHER; note = 2'-deoxy-2'-fluoroadenosine-3'-phosphate
  modified_base 2: mod_base = OTHER; note = 2'-O-methyluridine-3'-phosphate
  modified_base 3: mod_base = OTHER; note = 2'-deoxy-2'-fluoroguanosine-3'-phosphate
  modified_base 4: mod_base = OTHER; note = 2'-O-methyluridine-3'-phosphate
  modified_base 5: mod_base = OTHER; note = 2'-deoxy-2'-fluoroadenosine-3'-phosphate
  modified_base 6: mod_base = OTHER; note = 2'-O-methyladenosine-3'-phosphate
  modified_base 7: mod_base = OTHER; note = 2'-O-methylcytidine-3'-phosphate
  modified_base 8: mod_base = OTHER; note = 2'-O-methylcytidine-3'-phosphate
  modified_base 9: mod_base = OTHER; note = 2'-O-methyladenosine-3'-phosphate
  modified_base 10: mod_base = OTHER; note = 2'-O-methyladenosine-3'-phosphate
  modified_base 11: mod_base = OTHER; note = 2'-O-methylguanosine-3'-phosphate
  modified_base 12: mod_base = OTHER; note = 2'-O-methyladenosine-3'-phosphate
  modified_base 13: mod_base = OTHER; note = 2'-O-methylguanosine-3'-phosphate
  modified_base 14: mod_base = OTHER; note = 2'-O-methyluridine-3'-phosphate
  modified_base 15: mod_base = OTHER; note = 2'-deoxy-2'-fluoroadenosine-3'-phosphate
  modified_base 16: mod_base = OTHER; note = 2'-O-methyluridine-3'-phosphate
  modified_base 17: mod_base = OTHER; note = 2'-deoxy-2'-fluorouridine-3'-phosphate
  modified_base 18: mod_base = OTHER; note = 2'-O-methylcytidine-3'-phosphate
  modified_base 19: mod_base = OTHER; note = 2'-deoxy-2'-fluorocytidine-3'-phosphate
  modified_base 20: mod_base = OTHER; note = 2'-O-methyladenosine-3'-phosphorothioate
  modified_base 21: mod_base = OTHER; note = 2'-deoxy-2'-fluorouridine
atgtaaccaagagtattccat

SEQ ID NO: 225 - RNA, 21 nt, synthetic construct
  source 1..21: mol_type = other RNA
  modified_base 1: mod_base = OTHER; note = 2'-deoxy-2'-fluoroadenosine-3'-phosphate
  modified_base 2: mod_base = OTHER; note = 2'-O-methyluridine-3'-phosphate
  modified_base 3: mod_base = OTHER; note = 2'-deoxy-2'-fluoroguanosine-3'-phosphate
  modified_base 4: mod_base = OTHER; note = 2'-O-methyluridine-3'-phosphate
  modified_base 5: mod_base = OTHER; note = 2'-deoxy-2'-fluoroadenosine-3'-phosphate
  modified_base 6: mod_base = OTHER; note = 2'-O-methyladenosine-3'-phosphate
  modified_base 7: mod_base = OTHER; note = 2'-O-methylcytidine-3'-phosphate
  modified_base 8: mod_base = OTHER; note = 2'-O-methylcytidine-3'-phosphate
  modified_base 9: mod_base = OTHER; note = 2'-O-methyladenosine-3'-phosphate
  modified_base 10: mod_base = OTHER; note = 2'-O-methyladenosine-3'-phosphate
  modified_base 11: mod_base = OTHER; note = 2'-O-methylguanosine-3'-phosphate
  modified_base 12: mod_base = OTHER; note = 2'-O-methyladenosine-3'-phosphate
  modified_base 13: mod_base = OTHER; note = 2'-O-methylguanosine-3'-phosphate
  modified_base 14: mod_base = OTHER; note = 2'-O-methyluridine-3'-phosphate
  modified_base 15: mod_base = OTHER; note = 2'-deoxy-2'-fluoroadenosine-3'-phosphate
  modified_base 16: mod_base = OTHER; note = 2'-O-methyluridine-3'-phosphate
  modified_base 17: mod_base = OTHER; note = 2'-deoxy-2'-fluorouridine-3'-phosphate
  modified_base 18: mod_base = OTHER; note = 2'-O-methylcytidine-3'-phosphate
  modified_base 19: mod_base = OTHER; note = 2'-deoxy-2'-fluorocytidine-3'-phosphate
  modified_base 20: mod_base = OTHER; note = 2'-O-methyladenosine-3'-phosphorothioate
  modified_base 21: mod_base = OTHER; note = 2'-deoxy-2'-fluorouridine
atgtaaccaagagtattccat

SEQ ID NO: 226 - RNA, 21 nt, synthetic construct
  source 1..21: mol_type = other RNA
  modified_base 1: mod_base = OTHER; note = 2'-deoxy-2'-fluoroadenosine-3'-phosphate
  modified_base 2: mod_base = OTHER; note = 2'-O-methyluridine-3'-phosphate
  modified_base 3: mod_base = OTHER; note = 2'-deoxy-2'-fluoroguanosine-3'-phosphate
  modified_base 4: mod_base = OTHER; note = 2'-O-methyluridine-3'-phosphate
  modified_base 5: mod_base = OTHER; note = 2'-deoxy-2'-fluoroadenosine-3'-phosphate
  modified_base 6: mod_base = OTHER; note = 2'-O-methyladenosine-3'-phosphate
  modified_base 7: mod_base = OTHER; note = 2'-O-methylcytidine-3'-phosphate
  modified_base 8: mod_base = OTHER; note = 2'-O-methylcytidine-3'-phosphate
  modified_base 9: mod_base = OTHER; note = 2'-O-methyladenosine-3'-phosphate
  modified_base 10: mod_base = OTHER; note = 2'-O-methyladenosine-3'-phosphate
  modified_base 11: mod_base = OTHER; note = 2'-O-methylguanosine-3'-phosphate
  modified_base 12: mod_base = OTHER; note = 2'-O-methyladenosine-3'-phosphate
  modified_base 13: mod_base = OTHER; note = 2'-O-methylguanosine-3'-phosphate
  modified_base 14: mod_base = OTHER; note = 2'-O-methyluridine-3'-phosphate
  modified_base 15: mod_base = OTHER; note = 2'-deoxy-2'-fluoroadenosine-3'-phosphate
  modified_base 16: mod_base = OTHER; note = 2'-O-methyluridine-3'-phosphate
  modified_base 17: mod_base = OTHER; note = 2'-deoxy-2'-fluorouridine-3'-phosphate
  modified_base 18: mod_base = OTHER; note = 2'-O-methylcytidine-3'-phosphate
  modified_base 19: mod_base = OTHER; note = 2'-deoxy-2'-fluorocytidine-3'-phosphate
  modified_base 20: mod_base = OTHER; note = 2'-O-methyladenosine-3'-phosphorothioate
  modified_base 21: mod_base = OTHER; note = 2'-deoxy-2'-fluorouridine
atgtaaccaagagtattccat

SEQ ID NO: 227 - RNA, 21 nt, synthetic construct
  source 1..21: mol_type = other RNA
  modified_base 1: mod_base = OTHER; note = 2'-deoxy-2'-fluoroadenosine-3'-phosphate
  modified_base 2: mod_base = OTHER; note = 2'-O-methyluridine-3'-phosphate
  modified_base 3: mod_base = OTHER; note = 2'-deoxy-2'-fluoroguanosine-3'-phosphate
  modified_base 4: mod_base = OTHER; note = 2'-O-methyluridine-3'-phosphate
  modified_base 5: mod_base = OTHER; note = 2'-deoxy-2'-fluoroadenosine-3'-phosphate
  modified_base 6: mod_base = OTHER; note = 2'-O-methyladenosine-3'-phosphate
  modified_base 7: mod_base = OTHER; note = 2'-O-methylcytidine-3'-phosphate
  modified_base 8: mod_base = OTHER; note = 2'-O-methylcytidine-3'-phosphate
  modified_base 9: mod_base = OTHER; note = 2'-O-methyladenosine-3'-phosphate
  modified_base 10: mod_base = OTHER; note = 2'-O-methyladenosine-3'-phosphate
  modified_base 11: mod_base = OTHER; note = 2'-O-methylguanosine-3'-phosphate
  modified_base 12: mod_base = OTHER; note = 2'-O-methyladenosine-3'-phosphate
  modified_base 13: mod_base = OTHER; note = 2'-O-methylguanosine-3'-phosphate
  modified_base 14: mod_base = OTHER; note = 2'-O-methyluridine-3'-phosphate
  modified_base 15: mod_base = OTHER; note = 2'-deoxy-2'-fluoroadenosine-3'-phosphate
  modified_base 16: mod_base = OTHER; note = 2'-O-methyluridine-3'-phosphate
  modified_base 17: mod_base = OTHER; note = 2'-deoxy-2'-fluorouridine-3'-phosphate
  modified_base 18: mod_base = OTHER; note = 2'-O-methylcytidine-3'-phosphate
  modified_base 19: mod_base = OTHER; note = 2'-deoxy-2'-fluorocytidine-3'-phosphate
  modified_base 20: mod_base = OTHER; note = 2'-O-methyladenosine-3'-phosphorothioate
  modified_base 21: mod_base = OTHER; note = 2'-deoxy-2'-fluorouridine
atgtaaccaagagtattccat

SEQ ID NO: 228 - RNA, 21 nt, synthetic construct
  source 1..21: mol_type = other RNA
  modified_base 1: mod_base = OTHER; note = 2'-O-methyladenosine-3'-phosphate
  modified_base 2: mod_base = OTHER; note = 2'-O-methyluridine-3'-phosphate
  modified_base 3: mod_base = OTHER; note = 2'-deoxy-2'-fluoroguanosine-3'-phosphate
  modified_base 4: mod_base = OTHER; note = 2'-O-methyluridine-3'-phosphate
  modified_base 5: mod_base = OTHER; note = 2'-deoxy-2'-fluoroadenosine-3'-phosphate
  modified_base 6: mod_base = OTHER; note = 2'-deoxy-2'-fluoroadenosine-3'-phosphate
  modified_base 7: mod_base = OTHER; note = 2'-O-methylcytidine-3'-phosphate
  modified_base 8: mod_base = OTHER; note = 2'-O-methylcytidine-3'-phosphate
  modified_base 9: mod_base = OTHER; note = 2'-deoxy-2'-fluoroadenosine-3'-phosphate
  modified_base 10: mod_base = OTHER; note = 2'-O-methyladenosine-3'-phosphate
  modified_base 11: mod_base = OTHER; note = 2'-deoxy-2'-fluoroguanosine-3'-phosphate
  modified_base 12: mod_base = OTHER; note = 2'-O-methyladenosine-3'-phosphate
  modified_base 13: mod_base = OTHER; note = 2'-O-methylguanosine-3'-phosphate
  modified_base 14: mod_base = OTHER; note = 2'-deoxy-2'-fluorouridine-3'-phosphate
  modified_base 15: mod_base = OTHER; note = 2'-O-methyladenosine-3'-phosphate
  modified_base 16: mod_base = OTHER; note = 2'-deoxy-2'-fluorouridine-3'-phosphate
  modified_base 17: mod_base = OTHER; note = 2'-deoxy-2'-fluorouridine-3'-phosphate
  modified_base 18: mod_base = OTHER; note = 2'-O-methylcytidine-3'-phosphate
  modified_base 19: mod_base = OTHER; note = 2'-deoxy-2'-fluorocytidine-3'-phosphate
  modified_base 20: mod_base = OTHER; note = 2'-O-methyladenosine-3'-phosphorothioate
  modified_base 21: mod_base = OTHER; note = 2'-deoxy-2'-fluorouridine
atgtaaccaagagtattccat

SEQ ID NO: 229 - RNA, 21 nt, synthetic construct
  source 1..21: mol_type = other RNA
  modified_base 1: mod_base = OTHER; note = 2'-deoxy-2'-fluoroadenosine-3'-phosphate
  modified_base 2: mod_base = OTHER; note = 2'-O-methyluridine-3'-phosphate
  modified_base 3: mod_base = OTHER; note = 2'-deoxy-2'-fluoroguanosine-3'-phosphate
  modified_base 4: mod_base = OTHER; note = 2'-O-methyluridine-3'-phosphate
  modified_base 5: mod_base = OTHER; note = 2'-deoxy-2'-fluoroadenosine-3'-phosphate
  modified_base 6: mod_base = OTHER; note = 2'-O-methyladenosine-3'-phosphate
  modified_base 7: mod_base = OTHER; note = 2'-O-methylcytidine-3'-phosphate
  modified_base 8: mod_base = OTHER; note = 2'-O-methylcytidine-3'-phosphate
  modified_base 9: mod_base = OTHER; note = 2'-O-methyladenosine-3'-phosphate
  modified_base 10: mod_base = OTHER; note = 2'-O-methyladenosine-3'-phosphate
  modified_base 11: mod_base = OTHER; note = 2'-O-methylguanosine-3'-phosphate
  modified_base 12: mod_base = OTHER; note = 2'-O-methyladenosine-3'-phosphate
  modified_base 13: mod_base = OTHER; note = 2'-O-methylguanosine-3'-phosphate
  modified_base 14: mod_base = OTHER; note = 2'-O-methyluridine-3'-phosphate
  modified_base 15: mod_base = OTHER; note = 2'-deoxy-2'-fluoroadenosine-3'-phosphate
  modified_base 16: mod_base = OTHER; note = 2'-O-methyluridine-3'-phosphate
  modified_base 17: mod_base = OTHER; note = 2'-deoxy-2'-fluorouridine-3'-phosphate
  modified_base 18: mod_base = OTHER; note = 2'-O-methylcytidine-3'-phosphate
  modified_base 19: mod_base = OTHER; note = 2'-deoxy-2'-fluorocytidine-3'-phosphate
  modified_base 20: mod_base = OTHER; note = 2'-O-methyladenosine-3'-phosphorothioate
  modified_base 21: mod_base = OTHER; note = 2'-deoxy-2'-fluorouridine
atgtaaccaagagtattccat

SEQ ID NO: 230 - RNA, 21 nt, synthetic construct
  source 1..21: mol_type = other RNA
  modified_base 1: mod_base = OTHER; note = 2'-O-methyladenosine-3'-phosphate
  modified_base 2: mod_base = OTHER; note = 2'-O-methyluridine-3'-phosphate
  modified_base 3: mod_base = OTHER; note = 2'-deoxy-2'-fluoroguanosine-3'-phosphate
  modified_base 4: mod_base = OTHER; note = 2'-O-methyluridine-3'-phosphate
  modified_base 5: mod_base = OTHER; note = 2'-O-methyladenosine-3'-phosphate
  modified_base 6: mod_base = OTHER; note = 2'-deoxy-2'-fluoroadenosine-3'-phosphate
  modified_base 7: mod_base = OTHER; note = 2'-O-methylcytidine-3'-phosphate
  modified_base 8: mod_base = OTHER; note = 2'-O-methylcytidine-3'-phosphate
  modified_base 9: mod_base = OTHER; note = 2'-deoxy-2'-fluoroadenosine-3'-phosphate
  modified_base 10: mod_base = OTHER; note = 2'-O-methyladenosine-3'-phosphate
  modified_base 11: mod_base = OTHER; note = 2'-O-methylguanosine-3'-phosphate
  modified_base 12: mod_base = OTHER; note = 2'-deoxy-2'-fluoroadenosine-3'-phosphate
  modified_base 13: mod_base = OTHER; note = 2'-O-methylguanosine-3'-phosphate
  modified_base 14: mod_base = OTHER; note = 2'-O-methyluridine-3'-phosphate
  modified_base 15: mod_base = OTHER; note = 2'-deoxy-2'-fluoroadenosine-3'-phosphate
  modified_base 16: mod_base = OTHER; note = 2'-O-methyluridine-3'-phosphate
  modified_base 17: mod_base = OTHER; note = 2'-O-methyluridine-3'-phosphate
  modified_base 18: mod_base = OTHER; note = 2'-deoxy-2'-fluorocytidine-3'-phosphate
  modified_base 19: mod_base = OTHER; note = 2'-O-methylcytidine-3'-phosphate
  modified_base 20: mod_base = OTHER; note = 2'-O-methyladenosine-3'-phosphorothioate
  modified_base 21: mod_base = OTHER; note = 2'-deoxy-2'-fluorouridine
atgtaaccaagagtattccat

SEQ ID NO: 231 - RNA, 21 nt, synthetic construct
  source 1..21: mol_type = other RNA
  modified_base 1: mod_base = OTHER; note = 2'-deoxy-2'-fluoroadenosine-3'-phosphate
  modified_base 2: mod_base = OTHER; note = 2'-O-methyluridine-3'-phosphate
  modified_base 3: mod_base = OTHER; note = 2'-deoxy-2'-fluoroguanosine-3'-phosphate
  modified_base 4: mod_base = OTHER; note = 2'-O-methyluridine-3'-phosphate
  modified_base 5: mod_base = OTHER; note = 2'-deoxy-2'-fluoroadenosine-3'-phosphate
  modified_base 6: mod_base = OTHER; note = 2'-O-methyladenosine-3'-phosphate
  modified_base 7: mod_base = OTHER; note = 2'-O-methylcytidine-3'-phosphate
  modified_base 8: mod_base = OTHER; note = 2'-O-methylcytidine-3'-phosphate
  modified_base 9: mod_base = OTHER; note = 2'-O-methyladenosine-3'-phosphate
  modified_base 10: mod_base = OTHER; note = 2'-O-methyladenosine-3'-phosphate
  modified_base 11: mod_base = OTHER; note = 2'-O-methylguanosine-3'-phosphate
  modified_base 12: mod_base = OTHER; note = 2'-O-methyladenosine-3'-phosphate
  modified_base 13: mod_base = OTHER; note = 2'-O-methylguanosine-3'-phosphate
  modified_base 14: mod_base = OTHER; note = 2'-O-methyluridine-3'-phosphate
  modified_base 15: mod_base = OTHER; note = 2'-deoxy-2'-fluoroadenosine-3'-phosphate
  modified_base 16: mod_base = OTHER; note = 2'-O-methyluridine-3'-phosphate
  modified_base 17: mod_base = OTHER; note = 2'-deoxy-2'-fluorouridine-3'-phosphate
  modified_base 18: mod_base = OTHER; note = 2'-O-methylcytidine-3'-phosphate
  modified_base 19: mod_base = OTHER; note = 2'-deoxy-2'-fluorocytidine-3'-phosphate
  modified_base 20: mod_base = OTHER; note = 2'-O-methyladenosine-3'-phosphorothioate
  modified_base 21: mod_base = OTHER; note = 2'-deoxy-2'-fluorouridine
atgtaaccaagagtattccat

SEQ ID NO: 232 - RNA, 21 nt, synthetic construct
  source 1..21: mol_type = other RNA
  modified_base 1: mod_base = OTHER; note = 2'-O-methyladenosine-3'-phosphate
  modified_base 2: mod_base = OTHER; note = 2'-O-methyluridine-3'-phosphate
  modified_base 3: mod_base = OTHER; note = 2'-O-methylguanosine-3'-phosphate
  modified_base 4: mod_base = OTHER; note = 2'-deoxy-2'-fluorouridine-3'-phosphate
  modified_base 5: mod_base = OTHER; note = 2'-O-methyladenosine-3'-phosphate
  modified_base 6: mod_base = OTHER; note = 2'-O-methyladenosine-3'-phosphate
  modified_base 7: mod_base = OTHER; note = 2'-O-methylcytidine-3'-phosphate
  modified_base 8: mod_base = OTHER; note = 2'-deoxy-2'-fluorocytidine-3'-phosphate
  modified_base 9: mod_base = OTHER; note = 2'-O-methyladenosine-3'-phosphate
  modified_base 10: mod_base = OTHER; note = 2'-O-methyladenosine-3'-phosphate
  modified_base 11: mod_base = OTHER; note = 2'-O-methylguanosine-3'-phosphate
  modified_base 12: mod_base = OTHER; note = 2'-deoxy-2'-fluoroadenosine-3'-phosphate
  modified_base 13: mod_base = OTHER; note = 2'-O-methylguanosine-3'-phosphate
  modified_base 14: mod_base = OTHER; note = 2'-O-methyluridine-3'-phosphate
  modified_base 15: mod_base = OTHER; note = 2'-O-methyladenosine-3'-phosphate
  modified_base 16: mod_base = OTHER; note = 2'-deoxy-2'-fluorouridine-3'-phosphate
  modified_base 17: mod_base = OTHER; note = 2'-O-methyluridine-3'-phosphate
  modified_base 18: mod_base = OTHER; note = 2'-O-methylcytidine-3'-phosphate
  modified_base 19: mod_base = OTHER; note = 2'-O-methylcytidine-3'-phosphate
  modified_base 20: mod_base = OTHER; note = 2'-deoxy-2'-fluoroadenosine-3'-phosphorothioate
  modified_base 21: mod_base = OTHER; note = 2'-O-methyluridine
atgtaaccaagagtattccat

SEQ ID NO: 233 - RNA, 21 nt, synthetic construct
  source 1..21: mol_type = other RNA
  modified_base 1: mod_base = OTHER; note = 2'-deoxy-2'-fluoroadenosine-3'-phosphate
  modified_base 2: mod_base = OTHER; note = 2'-O-methyluridine-3'-phosphate
  modified_base 3: mod_base = OTHER; note = 2'-deoxy-2'-fluoroguanosine-3'-phosphate
  modified_base 4: mod_base = OTHER; note = 2'-O-methyluridine-3'-phosphate
  modified_base 5: mod_base = OTHER; note = 2'-deoxy-2'-fluoroadenosine-3'-phosphate
  modified_base 6: mod_base = OTHER; note = 2'-O-methyladenosine-3'-phosphate
  modified_base 7: mod_base = OTHER; note = 2'-deoxy-2'-fluorocytidine-3'-phosphate
  modified_base 8: mod_base = OTHER; note = 2'-O-methylcytidine-3'-phosphate
  modified_base 9: mod_base = OTHER; note = 2'-deoxy-2'-fluoroadenosine-3'-phosphate
  modified_base 10: mod_base = OTHER; note = 2'-O-methyladenosine-3'-phosphate
  modified_base 11: mod_base = OTHER; note = 2'-deoxy-2'-fluoroguanosine-3'-phosphate
  modified_base 12: mod_base = OTHER; note = 2'-O-methyladenosine-3'-phosphate
  modified_base 13: mod_base = OTHER; note = 2'-deoxy-2'-fluoroguanosine-3'-phosphate
  modified_base 14: mod_base = OTHER; note = 2'-O-methyluridine-3'-phosphate
  modified_base 15: mod_base = OTHER; note = 2'-deoxy-2'-fluoroadenosine-3'-phosphate
  modified_base 16: mod_base = OTHER; note = 2'-O-methyluridine-3'-phosphate
  modified_base 17: mod_base = OTHER; note = 2'-deoxy-2'-fluorouridine-3'-phosphate
  modified_base 18: mod_base = OTHER; note = 2'-O-methylcytidine-3'-phosphate
  modified_base 19: mod_base = OTHER; note = 2'-deoxy-2'-fluorocytidine-3'-phosphate
  modified_base 20: mod_base = OTHER; note = 2'-O-methyladenosine-3'-phosphorothioate
  modified_base 21: mod_base = OTHER; note = 2'-deoxy-2'-fluorouridine
atgtaaccaagagtattccat

SEQ ID NO: 234 - RNA, 21 nt, synthetic construct
  source 1..21: mol_type = other RNA
  modified_base 1: mod_base = OTHER; note = 2'-deoxy-2'-fluoroadenosine-3'-phosphate
  modified_base 2: mod_base = OTHER; note = 2'-O-methyluridine-3'-phosphate
  modified_base 3: mod_base = OTHER; note = 2'-deoxy-2'-fluoroguanosine-3'-phosphate
  modified_base 4: mod_base = OTHER; note = 2'-O-methyluridine-3'-phosphate
  modified_base 5: mod_base = OTHER; note = 2'-deoxy-2'-fluoroadenosine-3'-phosphate
  modified_base 6: mod_base = OTHER; note = 2'-O-methyladenosine-3'-phosphate
  modified_base 7: mod_base = OTHER; note = 2'-deoxy-2'-fluorocytidine-3'-phosphate
  modified_base 8: mod_base = OTHER; note = 2'-O-methylcytidine-3'-phosphate
  modified_base 9: mod_base = OTHER; note = 2'-deoxy-2'-fluoroadenosine-3'-phosphate
  modified_base 10: mod_base = OTHER; note = 2'-O-methyladenosine-3'-phosphate
  modified_base 11: mod_base = OTHER; note = 2'-deoxy-2'-fluoroguanosine-3'-phosphate
  modified_base 12: mod_base = OTHER; note = 2'-O-methyladenosine-3'-phosphate
  modified_base 13: mod_base = OTHER; note = 2'-deoxy-2'-fluoroguanosine-3'-phosphate
  modified_base 14: mod_base = OTHER; note = 2'-O-methyluridine-3'-phosphate
  modified_base 15: mod_base = OTHER; note = 2'-deoxy-2'-fluoroadenosine-3'-phosphate
  modified_base 16: mod_base = OTHER; note = 2'-O-methyluridine-3'-phosphate
  modified_base 17: mod_base = OTHER; note = 2'-deoxy-2'-fluorouridine-3'-phosphate
  modified_base 18: mod_base = OTHER; note = 2'-O-methylcytidine-3'-phosphate
  modified_base 19: mod_base = OTHER; note = 2'-deoxy-2'-fluorocytidine-3'-phosphate
  modified_base 20: mod_base = OTHER; note = 2'-O-methyladenosine-3'-phosphorothioate
  modified_base 21: mod_base = OTHER; note = 2'-deoxy-2'-fluorouridine
atgtaaccaagagtattccat

SEQ ID NO: 235 - RNA, 21 nt, synthetic construct
  source 1..21: mol_type = other RNA
  modified_base 1: mod_base = OTHER; note = 2'-deoxy-2'-fluoroadenosine-3'-phosphate
  modified_base 2: mod_base = OTHER; note = 2'-O-methyluridine-3'-phosphate
  modified_base 3: mod_base = OTHER; note = 2'-deoxy-2'-fluoroguanosine-3'-phosphate
  modified_base 4: mod_base = OTHER; note = 2'-O-methyluridine-3'-phosphate
  modified_base 5: mod_base = OTHER; note = 2'-deoxy-2'-fluoroadenosine-3'-phosphate
  modified_base 6: mod_base = OTHER; note = 2'-O-methyladenosine-3'-phosphate
  modified_base 7: mod_base = OTHER; note = 2'-deoxy-2'-fluorocytidine-3'-phosphate
  modified_base 8: mod_base = OTHER; note = 2'-O-methylcytidine-3'-phosphate
  modified_base 9: mod_base = OTHER; note = 2'-deoxy-2'-fluoroadenosine-3'-phosphate
  modified_base 10: mod_base = OTHER; note = 2'-O-methyladenosine-3'-phosphate
  modified_base 11: mod_base = OTHER; note = 2'-deoxy-2'-fluoroguanosine-3'-phosphate
  modified_base 12: mod_base = OTHER; note = 2'-O-methyladenosine-3'-phosphate
  modified_base 13: mod_base = OTHER; note = 2'-deoxy-2'-fluoroguanosine-3'-phosphate
  modified_base 14: mod_base = OTHER; note = 2'-O-methyluridine-3'-phosphate
  modified_base 15: mod_base = OTHER; note = 2'-deoxy-2'-fluoroadenosine-3'-phosphate
  modified_base 16: mod_base = OTHER; note = 2'-O-methyluridine-3'-phosphate
  modified_base 17: mod_base = OTHER; note = 2'-deoxy-2'-fluorouridine-3'-phosphate
  modified_base 18: mod_base = OTHER; note = 2'-O-methylcytidine-3'-phosphate
  modified_base 19: mod_base = OTHER; note = 2'-deoxy-2'-fluorocytidine-3'-phosphate
  modified_base 20: mod_base = OTHER; note = 2'-O-methyladenosine-3'-phosphorothioate
  modified_base 21: mod_base = OTHER; note = 2'-deoxy-2'-fluorouridine
atgtaaccaagagtattccat

SEQ ID NO: 236 - RNA, 21 nt, synthetic construct
  source 1..21: mol_type = other RNA
  modified_base 1: mod_base = OTHER; note = 2'-O-methyladenosine-3'-phosphate
  modified_base 2: mod_base = OTHER; note = 2'-O-methyluridine-3'-phosphate
  modified_base 3: mod_base = OTHER; note = 2'-deoxy-2'-fluoroguanosine-3'-phosphate
  modified_base 4: mod_base = OTHER; note = 2'-O-methyluridine-3'-phosphate
  modified_base 5: mod_base = OTHER; note = 2'-deoxy-2'-fluoroadenosine-3'-phosphate
  modified_base 6: mod_base = OTHER; note = 2'-deoxy-2'-fluoroadenosine-3'-phosphate
  modified_base 7: mod_base = OTHER; note = 2'-deoxy-2'-fluorocytidine-3'-phosphate
  modified_base 8: mod_base = OTHER; note = 2'-O-methylcytidine-3'-phosphate
  modified_base 9: mod_base = OTHER; note = 2'-deoxy-2'-fluoroadenosine-3'-phosphate
  modified_base 10: mod_base = OTHER; note = 2'-O-methyladenosine-3'-phosphate
  modified_base 11: mod_base = OTHER; note = 2'-deoxy-2'-fluoroguanosine-3'-phosphate
  modified_base 12: mod_base = OTHER; note = 2'-O-methyladenosine-3'-phosphate
  modified_base 13: mod_base = OTHER; note = 2'-deoxy-2'-fluoroguanosine-3'-phosphate
  modified_base 14: mod_base = OTHER; note = 2'-O-methyluridine-3'-phosphate
  modified_base 15: mod_base = OTHER; note = 2'-deoxy-2'-fluoroadenosine-3'-phosphate
  modified_base 16: mod_base = OTHER; note = 2'-O-methyluridine-3'-phosphate
  modified_base 17: mod_base = OTHER; note = 2'-deoxy-2'-fluorouridine-3'-phosphate
  modified_base 18: mod_base = OTHER; note = 2'-O-methylcytidine-3'-phosphate
  modified_base 19: mod_base = OTHER; note = 2'-deoxy-2'-fluorocytidine-3'-phosphate
  modified_base 20: mod_base = OTHER; note = 2'-O-methyladenosine-3'-phosphorothioate
  modified_base 21: mod_base = OTHER; note = 2'-O-methyluridine
atgtaaccaagagtattccat

SEQ ID NO: 237 - RNA, 21 nt, synthetic construct
  source 1..21: mol_type = other RNA
  modified_base 1: mod_base = OTHER; note = 2'-deoxy-2'-fluoroadenosine-3'-phosphate
  modified_base 2: mod_base = OTHER; note = 2'-O-methyluridine-3'-phosphate
  modified_base 3: mod_base = OTHER; note = 2'-deoxy-2'-fluoroguanosine-3'-phosphate
  modified_base 4: mod_base = OTHER; note = 2'-O-methyluridine-3'-phosphate
  modified_base 5: mod_base = OTHER; note = 2'-deoxy-2'-fluoroadenosine-3'-phosphate
  modified_base 6: mod_base = OTHER; note = 2'-O-methyladenosine-3'-phosphate
  modified_base 7: mod_base = OTHER; note = 2'-deoxy-2'-fluorocytidine-3'-phosphate
  modified_base 8: mod_base = OTHER; note = 2'-deoxy-2'-fluorocytidine-3'-phosphate
  modified_base 9: mod_base = OTHER; note = 2'-deoxy-2'-fluoroadenosine-3'-phosphate
  modified_base 10: mod_base = OTHER; note = 2'-O-methyladenosine-3'-phosphate
  modified_base 11: mod_base = OTHER; note = 2'-deoxy-2'-fluoroguanosine-3'-phosphate
  modified_base 12: mod_base = OTHER; note = 2'-O-methyladenosine-3'-phosphate
  modified_base 13: mod_base = OTHER; note = 2'-deoxy-2'-fluoroguanosine-3'-phosphate
  modified_base 14: mod_base = OTHER; note = 2'-O-methyluridine-3'-phosphate
  modified_base 15: mod_base = OTHER; note = 2'-deoxy-2'-fluoroadenosine-3'-phosphate
  modified_base 16: mod_base = OTHER; note = 2'-O-methyluridine-3'-phosphate
  modified_base 17: mod_base = OTHER; note = 2'-deoxy-2'-fluorouridine-3'-phosphate
  modified_base 18: mod_base = OTHER; note = 2'-O-methylcytidine-3'-phosphate
  modified_base 19: mod_base = OTHER; note = 2'-deoxy-2'-fluorocytidine-3'-phosphate
  modified_base 20: mod_base = OTHER; note = 2'-O-methyladenosine-3'-phosphorothioate
  modified_base 21: mod_base = OTHER; note = 2'-O-methyluridine
atgtaaccaagagtattccat

SEQ ID NO: 238 - RNA, 21 nt, synthetic construct
  source 1..21: mol_type = other RNA
  modified_base 1: mod_base = OTHER; note = 2'-deoxy-2'-fluoroadenosine-3'-phosphate
  modified_base 2: mod_base = OTHER; note = 2'-O-methyluridine-3'-phosphate
  modified_base 3: mod_base = OTHER; note = 2'-deoxy-2'-fluoroguanosine-3'-phosphate
  modified_base 4: mod_base = OTHER; note = 2'-O-methyluridine-3'-phosphate
  modified_base 5: mod_base = OTHER; note = 2'-deoxy-2'-fluoroadenosine-3'-phosphate
  modified_base 6: mod_base = OTHER; note = 2'-O-methyladenosine-3'-phosphate
  modified_base 7: mod_base = OTHER; note = 2'-deoxy-2'-fluorocytidine-3'-phosphate
  modified_base 8: mod_base = OTHER; note = 2'-O-methylcytidine-3'-phosphate
  modified_base 9: mod_base = OTHER; note = 2'-deoxy-2'-fluoroadenosine-3'-phosphate
  modified_base 10: mod_base = OTHER; note = 2'-O-methyladenosine-3'-phosphate
  modified_base 11: mod_base = OTHER; note = 2'-deoxy-2'-fluoroguanosine-3'-phosphate
  modified_base 12: mod_base = OTHER; note = 2'-O-methyladenosine-3'-phosphate
  modified_base 13: mod_base = OTHER; note = 2'-deoxy-2'-fluoroguanosine-3'-phosphate
  modified_base 14: mod_base = OTHER; note = 2'-O-methyluridine-3'-phosphate
  modified_base 15: mod_base = OTHER; note = 2'-deoxy-2'-fluoroadenosine-3'-phosphate
  modified_base 16: mod_base = OTHER; note = 2'-O-methyluridine-3'-phosphate
  modified_base 17: mod_base = OTHER; note = 2'-deoxy-2'-fluorouridine-3'-phosphate
  modified_base 18: mod_base = OTHER; note = 2'-deoxy-2'-fluorocytidine-3'-phosphate
  modified_base 19: mod_base = OTHER; note = 2'-deoxy-2'-fluorocytidine-3'-phosphate
  modified_base 20: mod_base = OTHER; note = 2'-O-methyladenosine-3'-phosphorothioate
  modified_base 21: mod_base = OTHER; note = 2'-O-methyluridine
atgtaaccaagagtattccat

SEQ ID NO: 239 - RNA, 21 nt, synthetic construct
  source 1..21: mol_type = other RNA
  modified_base 1: mod_base = OTHER; note = 2'-O-methyladenosine-3'-phosphate
  modified_base 2: mod_base = OTHER; note = 2'-deoxy-2'-fluorouridine-3'-phosphate
  modified_base 3: mod_base = OTHER; note = 2'-O-methylguanosine-3'-phosphate
  modified_base 4: mod_base = OTHER; note = 2'-deoxy-2'-fluorouridine-3'-phosphate
  modified_base 5: mod_base = OTHER; note = 2'-O-methyladenosine-3'-phosphate
  modified_base 6: mod_base = OTHER; note = 2'-deoxy-2'-fluoroadenosine-3'-phosphate
  modified_base 7: mod_base = OTHER; note = 2'-O-methylcytidine-3'-phosphate
  modified_base 8: mod_base = OTHER; note = 2'-deoxy-2'-fluorocytidine-3'-phosphate
  modified_base 9: mod_base = OTHER; note = 2'-O-methyladenosine-3'-phosphate
  modified_base 10: mod_base = OTHER; note = 2'-deoxy-2'-fluoroadenosine-3'-phosphate
  modified_base 11: mod_base = OTHER; note = 2'-O-methylguanosine-3'-phosphate
  modified_base 12: mod_base = OTHER; note = 2'-deoxy-2'-fluoroadenosine-3'-phosphate
  modified_base 13: mod_base = OTHER; note = 2'-O-methylguanosine-3'-phosphate
  modified_base 14: mod_base = OTHER; note = 2'-deoxy-2'-fluorouridine-3'-phosphate
  modified_base 15: mod_base = OTHER; note = 2'-O-methyladenosine-3'-phosphate
  modified_base 16: mod_base = OTHER; note = 2'-deoxy-2'-fluorouridine-3'-phosphate
  modified_base 17: mod_base = OTHER; note = 2'-O-methyluridine-3'-phosphate
  modified_base 18: mod_base = OTHER; note = 2'-deoxy-2'-fluorocytidine-3'-phosphate
  modified_base 19: mod_base = OTHER; note = 2'-O-methylcytidine-3'-phosphate
  modified_base 20: mod_base = OTHER; note = 2'-deoxy-2'-fluoroadenosine-3'-phosphorothioate
  modified_base 21: mod_base = OTHER; note = 2'-O-methyluridine
atgtaaccaagagtattccat

SEQ ID NO: 240 - RNA, 21 nt, synthetic construct
  source 1..21: mol_type = other RNA
  modified_base 1: mod_base = OTHER; note = 2'-O-methyladenosine-3'-phosphate
  modified_base 2: mod_base = OTHER; note = 2'-deoxy-2'-fluorouridine-3'-phosphate
  modified_base 3: mod_base = OTHER; note = 2'-O-methylguanosine-3'-phosphate
  modified_base 4: mod_base = OTHER; note = 2'-deoxy-2'-fluorouridine-3'-phosphate
  modified_base 5: mod_base = OTHER; note = 2'-O-methyladenosine-3'-phosphate
  modified_base 6: mod_base = OTHER; note = 2'-deoxy-2'-fluoroadenosine-3'-phosphate
  modified_base 7: mod_base = OTHER; note = 2'-O-methylcytidine-3'-phosphate
  modified_base 8: mod_base = OTHER; note = 2'-deoxy-2'-fluorocytidine-3'-phosphate
  modified_base 9: mod_base = OTHER; note = 2'-O-methyladenosine-3'-phosphate
  modified_base 10: mod_base = OTHER; note = 2'-deoxy-2'-fluoroadenosine-3'-phosphate
  modified_base 11: mod_base = OTHER; note = 2'-O-methylguanosine-3'-phosphate
  modified_base 12: mod_base = OTHER; note = 2'-deoxy-2'-fluoroadenosine-3'-phosphate
  modified_base 13: mod_base = OTHER; note = 2'-O-methylguanosine-3'-phosphate
  modified_base 14: mod_base = OTHER; note = 2'-deoxy-2'-fluorouridine-3'-phosphate
  modified_base 15: mod_base = OTHER; note = 2'-O-methyladenosine-3'-phosphate
  modified_base 16: mod_base = OTHER; note = 2'-deoxy-2'-fluorouridine-3'-phosphate
  modified_base 17: mod_base = OTHER; note = 2'-O-methyluridine-3'-phosphate
  modified_base 18: mod_base = OTHER; note = 2'-deoxy-2'-fluorocytidine-3'-phosphate
  modified_base 19: mod_base = OTHER; note = 2'-O-methylcytidine-3'-phosphate
  modified_base 20: mod_base = OTHER; note = 2'-deoxy-2'-fluoroadenosine-3'-phosphorothioate
  modified_base 21: mod_base = OTHER; note = 2'-O-methyluridine
atgtaaccaagagtattccat

SEQ ID NO: 241 - RNA, 21 nt, synthetic construct
  source 1..21: mol_type = other RNA
  modified_base 1: mod_base = OTHER; note = 2'-deoxy-2'-fluoroadenosine-3'-phosphate
  modified_base 2: mod_base = OTHER; note = 2'-O-methyluridine-3'-phosphate
  modified_base 3: mod_base = OTHER; note = 2'-deoxy-2'-fluoroguanosine-3'-phosphate
  modified_base 4: mod_base = OTHER; note = 2'-O-methyluridine-3'-phosphate
  modified_base 5: mod_base = OTHER; note = 2'-deoxy-2'-fluoroadenosine-3'-phosphate
  modified_base 6: mod_base = OTHER; note = 2'-O-methyladenosine-3'-phosphate
  modified_base 7: mod_base = OTHER; note = 2'-deoxy-2'-fluorocytidine-3'-phosphate
  modified_base 8: mod_base = OTHER; note = 2'-O-methylcytidine-3'-phosphate
  modified_base 9: mod_base = OTHER; note = 2'-deoxy-2'-fluoroadenosine-3'-phosphate
  modified_base 10: mod_base = OTHER; note = 2'-O-methyladenosine-3'-phosphate
  modified_base 11: mod_base = OTHER; note = 2'-deoxy-2'-fluoroguanosine-3'-phosphate
  modified_base 12: mod_base = OTHER; note = 2'-O-methyladenosine-3'-phosphate
  modified_base 13: mod_base = OTHER; note = 2'-deoxy-2'-fluoroguanosine-3'-phosphate
  modified_base 14: mod_base = OTHER; note = 2'-O-methyluridine-3'-phosphate
  modified_base 15: mod_base = OTHER; note = 2'-deoxy-2'-fluoroadenosine-3'-phosphate
  modified_base 16: mod_base = OTHER; note = 2'-O-methyluridine-3'-phosphate
  modified_base 17: mod_base = OTHER; note = 2'-deoxy-2'-fluorouridine-3'-phosphate
  modified_base 18: mod_base = OTHER; note = 2'-O-methylcytidine-3'-phosphate
  modified_base 19: mod_base = OTHER; note = 2'-deoxy-2'-fluorocytidine-3'-phosphate
  modified_base 20: mod_base = OTHER; note = 2'-O-methyladenosine-3'-phosphorothioate
  modified_base 21: mod_base = OTHER; note = 2'-deoxy-2'-fluorouridine
atgtaaccaagagtattccat

SEQ ID NO: 242 - RNA, 21 nt, synthetic construct
  source 1..21: mol_type = other RNA
  modified_base 1: mod_base = OTHER; note = 2'-O-methyladenosine-3'-phosphate
  modified_base 2: mod_base = OTHER; note = 2'-O-methyluridine-3'-phosphate
  modified_base 3: mod_base = OTHER; note = 2'-O-methylguanosine-3'-phosphate
  modified_base 4: mod_base = OTHER; note = 2'-deoxy-2'-fluorouridine-3'-phosphate
  modified_base 5: mod_base = OTHER; note = 2'-O-methyladenosine-3'-phosphate
  modified_base 6: mod_base = OTHER; note = 2'-deoxy-2'-fluoroadenosine-3'-phosphate
  modified_base 7: mod_base = OTHER; note = 2'-O-methylcytidine-3'-phosphate
  modified_base 8: mod_base = OTHER; note = 2'-O-methylcytidine-3'-phosphate
  modified_base 9: mod_base = OTHER; note = 2'-O-methyladenosine-3'-phosphate
  modified_base 10: mod_base = OTHER; note = 2'-deoxy-2'-fluoroadenosine-3'-phosphate
  modified_base 11: mod_base = OTHER; note = 2'-O-methylguanosine-3'-phosphate
  modified_base 12: mod_base = OTHER; note = 2'-deoxy-2'-fluoroadenosine-3'-phosphate
  modified_base 13: mod_base = OTHER; note = 2'-O-methylguanosine-3'-phosphate
  modified_base 14: mod_base = OTHER; note = 2'-O-methyluridine-3'-phosphate
  modified_base 15: mod_base = OTHER; note = 2'-O-methyladenosine-3'-phosphate
  modified_base 16: mod_base = OTHER; note = 2'-deoxy-2'-fluorouridine-3'-phosphate
  modified_base 17: mod_base = OTHER; note = 2'-O-methyluridine-3'-phosphate
  modified_base 18: mod_base = OTHER; note = 2'-deoxy-2'-fluorocytidine-3'-phosphate
  modified_base 19: mod_base = OTHER; note = 2'-O-methylcytidine-3'-phosphate
  modified_base 20: mod_base = OTHER; note = 2'-O-methyladenosine-3'-phosphorothioate
  modified_base 21: mod_base = OTHER; note = 2'-O-methyluridine
atgtaaccaagagtattccat

SEQ ID NO: 243 - RNA, 21 nt, synthetic construct
  source 1..21: mol_type = other RNA
  modified_base 1: mod_base = OTHER; note = 2'-deoxy-2'-fluoroadenosine-3'-phosphate
  modified_base 2: mod_base = OTHER; note = 2'-O-methyluridine-3'-phosphate
  modified_base 3: mod_base = OTHER; note = 2'-O-methylguanosine-3'-phosphate
  modified_base 4: mod_base = OTHER; note = 2'-deoxy-2'-fluorouridine-3'-phosphate
  modified_base 5: mod_base = OTHER; note = 2'-O-methyladenosine-3'-phosphate
  modified_base 6: mod_base = OTHER; note = 2'-deoxy-2'-fluoroadenosine-3'-phosphate
  modified_base 7: mod_base = OTHER; note = 2'-O-methylcytidine-3'-phosphate
  modified_base 8: mod_base = OTHER; note = 2'-O-methylcytidine-3'-phosphate
  modified_base 9: mod_base = OTHER; note = 2'-O-methyladenosine-3'-phosphate
  modified_base 10: mod_base = OTHER; note = 2'-deoxy-2'-fluoroadenosine-3'-phosphate
  modified_base 11: mod_base = OTHER; note = 2'-O-methylguanosine-3'-phosphate
  modified_base 12: mod_base = OTHER; note = 2'-deoxy-2'-fluoroadenosine-3'-phosphate
  modified_base 13: mod_base = OTHER; note = 2'-O-methylguanosine-3'-phosphate
  modified_base 14: mod_base = OTHER; note = 2'-O-methyluridine-3'-phosphate
  modified_base 15: mod_base = OTHER; note = 2'-O-methyladenosine-3'-phosphate
  modified_base 16: mod_base = OTHER; note = 2'-deoxy-2'-fluorouridine-3'-phosphate
  modified_base 17: mod_base = OTHER; note = 2'-O-methyluridine-3'-phosphate
  modified_base 18: mod_base = OTHER; note = 2'-deoxy-2'-fluorocytidine-3'-phosphate
  modified_base 19: mod_base = OTHER; note = 2'-O-methylcytidine-3'-phosphate
  modified_base 20: mod_base = OTHER; note = 2'-O-methyladenosine-3'-phosphorothioate
  modified_base 21: mod_base = OTHER; note = 2'-O-methyluridine
atgtaaccaagagtattccat

SEQ ID NO: 244 - RNA, 21 nt, synthetic construct
  source 1..21: mol_type = other RNA
  modified_base 1: mod_base = OTHER; note = 2'-deoxy-2'-fluoroadenosine-3'-phosphate
  modified_base 2: mod_base = OTHER; note = 2'-O-methyluridine-3'-phosphate
  modified_base 3: mod_base = OTHER; note = 2'-deoxy-2'-fluoroguanosine-3'-phosphate
  modified_base 4: mod_base = OTHER; note = 2'-O-methyluridine-3'-phosphate
  modified_base 5: mod_base = OTHER; note = 2'-deoxy-2'-fluoroadenosine-3'-phosphate
  modified_base 6: mod_base = OTHER; note = 2'-O-methyladenosine-3'-phosphate
  modified_base 7: mod_base = OTHER; note = 2'-deoxy-2'-fluorocytidine-3'-phosphate
  modified_base 8: mod_base = OTHER; note = 2'-O-methylcytidine-3'-phosphate
  modified_base 9: mod_base = OTHER; note = 2'-deoxy-2'-fluoroadenosine-3'-phosphate
  modified_base 10: mod_base = OTHER; note = 2'-O-methyladenosine-3'-phosphate
  modified_base 11: mod_base = OTHER; note = 2'-deoxy-2'-fluoroguanosine-3'-phosphate
  modified_base 12: mod_base = OTHER; note = 2'-O-methyladenosine-3'-phosphate
  modified_base 13: mod_base = OTHER; note = 2'-deoxy-2'-fluoroguanosine-3'-phosphate
  modified_base 14: mod_base = OTHER; note = 2'-O-methyluridine-3'-phosphate
  modified_base 15: mod_base = OTHER; note = 2'-deoxy-2'-fluoroadenosine-3'-phosphate
  modified_base 16: mod_base = OTHER; note = 2'-O-methyluridine-3'-phosphate
  modified_base 17: mod_base = OTHER; note = 2'-deoxy-2'-fluorouridine-3'-phosphate
  modified_base 18: mod_base = OTHER; note = 2'-O-methylcytidine-3'-phosphate
  modified_base 19: mod_base = OTHER; note = 2'-deoxy-2'-fluorocytidine-3'-phosphate
  modified_base 20: mod_base = OTHER; note = 2'-O-methyladenosine-3'-phosphorothioate
  modified_base 21: mod_base = OTHER; note = 2'-deoxy-2'-fluorouridine
atgtaaccaagagtattccat

SEQ ID NO: 245 - RNA, 21 nt, synthetic construct
  source 1..21: mol_type = other RNA
  modified_base 1: mod_base = OTHER; note = 2'-deoxy-2'-fluoroadenosine-3'-phosphate
  modified_base 2: mod_base = OTHER; note = 2'-O-methyluridine-3'-phosphate
  modified_base 3: mod_base = OTHER; note = 2'-deoxy-2'-fluoroguanosine-3'-phosphate
  modified_base 4: mod_base = OTHER; note = 2'-O-methyluridine-3'-phosphate
  modified_base 5: mod_base = OTHER; note = 2'-deoxy-2'-fluoroadenosine-3'-phosphate
  modified_base 6: mod_base = OTHER; note = 2'-O-methyladenosine-3'-phosphate
  modified_base 7: mod_base = OTHER; note = 2'-deoxy-2'-fluorocytidine-3'-phosphate
  modified_base 8: mod_base = OTHER; note = 2'-O-methylcytidine-3'-phosphate
  modified_base 9: mod_base = OTHER; note = 2'-deoxy-2'-fluoroadenosine-3'-phosphate
  modified_base 10: mod_base = OTHER; note = 2'-O-methyladenosine-3'-phosphate
  modified_base 11: mod_base = OTHER; note = 2'-deoxy-2'-fluoroguanosine-3'-phosphate
  modified_base 12: mod_base = OTHER; note = 2'-O-methyladenosine-3'-phosphate
  modified_base 13: mod_base = OTHER; note = 2'-deoxy-2'-fluoroguanosine-3'-phosphate
  modified_base 14: mod_base = OTHER; note = 2'-O-methyluridine-3'-phosphate
  modified_base 15: mod_base = OTHER; note = 2'-deoxy-2'-fluoroadenosine-3'-phosphate
  modified_base 16: mod_base = OTHER; note = 2'-O-methyluridine-3'-phosphate
  modified_base 17: mod_base = OTHER; note = 2'-deoxy-2'-fluorouridine-3'-phosphate
  modified_base 18: mod_base = OTHER; note = 2'-O-methylcytidine-3'-phosphate
  modified_base 19: mod_base = OTHER; note = 2'-deoxy-2'-fluorocytidine-3'-phosphate
  modified_base 20: mod_base = OTHER; note = 2'-O-methyladenosine-3'-phosphorothioate
  modified_base 21: mod_base = OTHER; note = 2'-deoxy-2'-fluorouridine
atgtaaccaagagtattccat

SEQ ID NO: 246 - RNA, 21 nt, synthetic construct
  source 1..21: mol_type = other RNA
  modified_base 1: mod_base = OTHER; note = 2'-deoxy-2'-fluoroadenosine-3'-phosphate
  modified_base 2: mod_base = OTHER; note = 2'-O-methyluridine-3'-phosphate
  modified_base 3: mod_base = OTHER; note = 2'-deoxy-2'-fluoroguanosine-3'-phosphate
  modified_base 4: mod_base = OTHER; note = 2'-O-methyluridine-3'-phosphate
  modified_base 5: mod_base = OTHER; note = 2'-deoxy-2'-fluoroadenosine-3'-phosphate
  modified_base 6: mod_base = OTHER; note = 2'-O-methyladenosine-3'-phosphate
  modified_base 7: mod_base = OTHER; note = 2'-deoxy-2'-fluorocytidine-3'-phosphate
  modified_base 8: mod_base = OTHER; note = 2'-O-methylcytidine-3'-phosphate
  modified_base 9: mod_base = OTHER; note = 2'-deoxy-2'-fluoroadenosine-3'-phosphate
  modified_base 10: mod_base = OTHER; note = 2'-O-methyladenosine-3'-phosphate
  modified_base 11: mod_base = OTHER; note = 2'-deoxy-2'-fluoroguanosine-3'-phosphate
  modified_base 12: mod_base = OTHER; note = 2'-O-methyladenosine-3'-phosphate
  modified_base 13: mod_base = OTHER; note = 2'-deoxy-2'-fluoroguanosine-3'-phosphate
  modified_base 14: mod_base = OTHER; note = 2'-O-methyluridine-3'-phosphate
  modified_base 15: mod_base = OTHER; note = 2'-deoxy-2'-fluoroadenosine-3'-phosphate
  modified_base 16: mod_base = OTHER; note = 2'-O-methyluridine-3'-phosphate
  modified_base 17: mod_base = OTHER; note = 2'-deoxy-2'-fluorouridine-3'-phosphate
  modified_base 18: mod_base = OTHER; note = 2'-O-methylcytidine-3'-phosphate
  modified_base 19: mod_base = OTHER; note = 2'-deoxy-2'-fluorocytidine-3'-phosphate
  modified_base 20: mod_base = OTHER; note = 2'-O-methyladenosine-3'-phosphorothioate
  modified_base 21: mod_base = OTHER; note = 2'-deoxy-2'-fluorouridine
atgtaaccaagagtattccat

SEQ ID NO: 247 - RNA, 21 nt, synthetic construct
  source 1..21: mol_type = other RNA
  modified_base 1: mod_base = OTHER; note = 2'-deoxy-2'-fluoroadenosine-3'-phosphate
  modified_base 2: mod_base = OTHER; note = 2'-O-methyluridine-3'-phosphate
  modified_base 3: mod_base = OTHER; note = 2'-deoxy-2'-fluoroguanosine-3'-phosphate
  modified_base 4: mod_base = OTHER; note = 2'-O-methyluridine-3'-phosphate
  modified_base 5: mod_base = OTHER; note = 2'-deoxy-2'-fluoroadenosine-3'-phosphate
  modified_base 6: mod_base = OTHER; note = 2'-O-methyladenosine-3'-phosphate
  modified_base 7: mod_base = OTHER; note = 2'-deoxy-2'-fluorocytidine-3'-phosphate
  modified_base 8: mod_base = OTHER; note = 2'-O-methylcytidine-3'-phosphate
  modified_base 9: mod_base = OTHER; note = 2'-deoxy-2'-fluoroadenosine-3'-phosphate
  modified_base 10: mod_base = OTHER; note = 2'-O-methyladenosine-3'-phosphate
  modified_base 11: mod_base = OTHER; note = 2'-deoxy-2'-fluoroguanosine-3'-phosphate
  modified_base 12: mod_base = OTHER; note = 2'-O-methyladenosine-3'-phosphate
  modified_base 13: mod_base = OTHER; note = 2'-deoxy-2'-fluoroguanosine-3'-phosphate
  modified_base 14: mod_base = OTHER; note = 2'-O-methyluridine-3'-phosphate
  modified_base 15: mod_base = OTHER; note = 2'-deoxy-2'-fluoroadenosine-3'-phosphate
  modified_base 16: mod_base = OTHER; note = 2'-O-methyluridine-3'-phosphate
  modified_base 17: mod_base = OTHER; note = 2'-deoxy-2'-fluorouridine-3'-phosphate
  modified_base 18: mod_base = OTHER; note = 2'-O-methylcytidine-3'-phosphate
  modified_base 19: mod_base = OTHER; note = 2'-deoxy-2'-fluorocytidine-3'-phosphate
  modified_base 20: mod_base = OTHER; note = 2'-O-methyladenosine-3'-phosphorothioate
  modified_base 21: mod_base = OTHER; note = 2'-deoxy-2'-fluorouridine
atgtaaccaagagtattccat

SEQ ID NO: 248 - RNA, 21 nt, synthetic construct
  source 1..21: mol_type = other RNA
  modified_base 1: mod_base = OTHER; note = 2'-deoxy-2'-fluoroadenosine-3'-phosphate
  modified_base 2: mod_base = OTHER; note = 2'-O-methyluridine-3'-phosphate
  modified_base 3: mod_base = OTHER; note = 2'-deoxy-2'-fluoroguanosine-3'-phosphate
  modified_base 4: mod_base = OTHER; note = 2'-O-methyluridine-3'-phosphate
  modified_base 5: mod_base = OTHER; note = 2'-deoxy-2'-fluoroadenosine-3'-phosphate
  modified_base 6: mod_base = OTHER; note = 2'-O-methyladenosine-3'-phosphate
  modified_base 7: mod_base = OTHER; note = 2'-deoxy-2'-fluorocytidine-3'-phosphate
  modified_base 8: mod_base = OTHER; note = 2'-O-methylcytidine-3'-phosphate
  modified_base 9: mod_base = OTHER; note = 2'-deoxy-2'-fluoroadenosine-3'-phosphate
  modified_base 10: mod_base = OTHER; note = 2'-O-methyladenosine-3'-phosphate
  modified_base 11: mod_base = OTHER; note = 2'-deoxy-2'-fluoroguanosine-3'-phosphate
  modified_base 12: mod_base = OTHER; note = 2'-O-methyladenosine-3'-phosphate
  modified_base 13: mod_base = OTHER; note = 2'-deoxy-2'-fluoroguanosine-3'-phosphate
  modified_base 14: mod_base = OTHER; note = 2'-O-methyluridine-3'-phosphate
  modified_base 15: mod_base = OTHER; note = 2'-deoxy-2'-fluoroadenosine-3'-phosphate
  modified_base 16: mod_base = OTHER; note = 2'-O-methyluridine-3'-phosphate
  modified_base 17: mod_base = OTHER; note = 2'-deoxy-2'-fluorouridine-3'-phosphate
  modified_base 18: mod_base = OTHER; note = 2'-O-methylcytidine-3'-phosphate
  modified_base 19: mod_base = OTHER; note = 2'-deoxy-2'-fluorocytidine-3'-phosphate
  modified_base 20: mod_base = OTHER; note = 2'-O-methyladenosine-3'-phosphorothioate
  modified_base 21: mod_base = OTHER; note = 2'-deoxy-2'-fluorouridine
atgtaaccaagagtattccat

SEQ ID NO: 249 - RNA, 21 nt, synthetic construct
  source 1..21: mol_type = other RNA
  modified_base 1: mod_base = OTHER; note = 2'-deoxy-2'-fluoroadenosine-3'-phosphate
  modified_base 2: mod_base = OTHER; note = 2'-O-methyluridine-3'-phosphate
  modified_base 3: mod_base = OTHER; note = 2'-deoxy-2'-fluoroguanosine-3'-phosphate
  modified_base 4: mod_base = OTHER; note = 2'-O-methyluridine-3'-phosphate
  modified_base 5: mod_base = OTHER; note = 2'-deoxy-2'-fluoroadenosine-3'-phosphate
  modified_base 6: mod_base = OTHER; note = 2'-O-methyladenosine-3'-phosphate
  modified_base 7: mod_base = OTHER; note = 2'-deoxy-2'-fluorocytidine-3'-phosphate
  modified_base 8: mod_base = OTHER; note = 2'-O-methylcytidine-3'-phosphate
  modified_base 9: mod_base = OTHER; note = 2'-deoxy-2'-fluoroadenosine-3'-phosphate
  modified_base 10: mod_base = OTHER; note = 2'-O-methyladenosine-3'-phosphate
  modified_base 11: mod_base = OTHER; note = 2'-deoxy-2'-fluoroguanosine-3'-phosphate
  modified_base 12: mod_base = OTHER; note = 2'-O-methyladenosine-3'-phosphate
  modified_base 13: mod_base = OTHER; note = 2'-deoxy-2'-fluoroguanosine-3'-phosphate
  modified_base 14: mod_base = OTHER; note = 2'-O-methyluridine-3'-phosphate
  modified_base 15: mod_base = OTHER; note = 2'-deoxy-2'-fluoroadenosine-3'-phosphate
  modified_base 16: mod_base = OTHER; note = 2'-O-methyluridine-3'-phosphate
  modified_base 17: mod_base = OTHER; note = 2'-deoxy-2'-fluorouridine-3'-phosphate
  modified_base 18: mod_base = OTHER; note = 2'-O-methylcytidine-3'-phosphate
  modified_base 19: mod_base = OTHER; note = 2'-deoxy-2'-fluorocytidine-3'-phosphate
  modified_base 20: mod_base = OTHER; note = 2'-O-methyladenosine-3'-phosphorothioate
  modified_base 21: mod_base = OTHER; note = 2'-deoxy-2'-fluorouridine
atgtaaccaagagtattccat

SEQ ID NO: 250 - RNA, 21 nt, synthetic construct
  source 1..21: mol_type = other RNA
  modified_base 1: mod_base = OTHER; note = 2'-deoxy-2'-fluoroadenosine-3'-phosphate
  modified_base 2: mod_base = OTHER; note = 2'-O-methyluridine-3'-phosphate
  modified_base 3: mod_base = OTHER; note = 2'-deoxy-2'-fluoroguanosine-3'-phosphate
  modified_base 4: mod_base = OTHER; note = 2'-O-methyluridine-3'-phosphate
  modified_base 5: mod_base = OTHER; note = 2'-deoxy-2'-fluoroadenosine-3'-phosphate
  modified_base 6: mod_base = OTHER; note = 2'-O-methyladenosine-3'-phosphate
  modified_base 7: mod_base = OTHER; note = 2'-deoxy-2'-fluorocytidine-3'-phosphate
  modified_base 8: mod_base = OTHER; note = 2'-O-methylcytidine-3'-phosphate
  modified_base 9: mod_base = OTHER; note = 2'-deoxy-2'-fluoroadenosine-3'-phosphate
  modified_base 10: mod_base = OTHER; note = 2'-O-methyladenosine-3'-phosphate
  modified_base 11: mod_base = OTHER; note = 2'-deoxy-2'-fluoroguanosine-3'-phosphate
  modified_base 12: mod_base = OTHER; note = 2'-O-methyladenosine-3'-phosphate
  modified_base 13: mod_base = OTHER; note = 2'-deoxy-2'-fluoroguanosine-3'-phosphate
  modified_base 14: mod_base = OTHER; note = 2'-O-methyluridine-3'-phosphate
  modified_base 15: mod_base = OTHER; note = 2'-deoxy-2'-fluoroadenosine-3'-phosphate
  modified_base 16: mod_base = OTHER; note = 2'-O-methyluridine-3'-phosphate
  modified_base 17: mod_base = OTHER; note = 2'-deoxy-2'-fluorouridine-3'-phosphate
  modified_base 18: mod_base = OTHER; note = 2'-O-methylcytidine-3'-phosphate
  modified_base 19: mod_base = OTHER; note = 2'-deoxy-2'-fluorocytidine-3'-phosphate
  modified_base 20: mod_base = OTHER; note = 2'-O-methyladenosine-3'-phosphorothioate
  modified_base 21: mod_base = OTHER; note = 2'-deoxy-2'-fluorouridine
atgtaaccaagagtattccat

SEQ ID NO: 251 - RNA, 21 nt, synthetic construct
  source 1..21: mol_type = other RNA
  modified_base 1: mod_base = OTHER; note = 2'-deoxy-2'-fluoroadenosine-3'-phosphate
  modified_base 2: mod_base = OTHER; note = 2'-O-methyluridine-3'-phosphate
  modified_base 3: mod_base = OTHER; note = 2'-deoxy-2'-fluoroguanosine-3'-phosphate
  modified_base 4: mod_base = OTHER; note = 2'-O-methyluridine-3'-phosphate
  modified_base 5: mod_base = OTHER; note = 2'-deoxy-2'-fluoroadenosine-3'-phosphate
  modified_base 6: mod_base = OTHER; note = 2'-O-methyladenosine-3'-phosphate
  modified_base 7: mod_base = OTHER; note = 2'-deoxy-2'-fluorocytidine-3'-phosphate
  modified_base 8: mod_base = OTHER; note = 2'-O-methylcytidine-3'-phosphate
  modified_base 9: mod_base = OTHER; note = 2'-deoxy-2'-fluoroadenosine-3'-phosphate
  modified_base 10: mod_base = OTHER; note = 2'-O-methyladenosine-3'-phosphate
  modified_base 11: mod_base = OTHER; note = 2'-deoxy-2'-fluoroguanosine-3'-phosphate
  modified_base 12: mod_base = OTHER; note = 2'-O-methyladenosine-3'-phosphate
  modified_base 13: mod_base = OTHER; note = 2'-deoxy-2'-fluoroguanosine-3'-phosphate
  modified_base 14: mod_base = OTHER; note = 2'-O-methyluridine-3'-phosphate
  modified_base 15: mod_base = OTHER; note = 2'-deoxy-2'-fluoroadenosine-3'-phosphate
  modified_base 16: mod_base = OTHER; note = 2'-O-methyluridine-3'-phosphate
  modified_base 17: mod_base = OTHER; note = 2'-deoxy-2'-fluorouridine-3'-phosphate
  modified_base 18: mod_base = OTHER; note = 2'-O-methylcytidine-3'-phosphate
  modified_base 19: mod_base = OTHER; note = 2'-deoxy-2'-fluorocytidine-3'-phosphate
  modified_base 20: mod_base = OTHER; note = 2'-O-methyladenosine-3'-phosphorothioate
  modified_base 21: mod_base = OTHER; note = 2'-deoxy-2'-fluorouridine
atgtaaccaagagtattccat

SEQ ID NO: 252 - RNA, 21 nt, synthetic construct
  source 1..21: mol_type = other RNA
  modified_base 1: mod_base = OTHER; note = 2'-deoxy-2'-fluoroadenosine-3'-phosphate
  modified_base 2: mod_base = OTHER; note = 2'-O-methyluridine-3'-phosphate
  modified_base 3: mod_base = OTHER; note = 2'-deoxy-2'-fluoroguanosine-3'-phosphate
  modified_base 4: mod_base = OTHER; note = 2'-O-methyluridine-3'-phosphate
  modified_base 5: mod_base = OTHER; note = 2'-deoxy-2'-fluoroadenosine-3'-phosphate
  modified_base 6: mod_base = OTHER; note = 2'-O-methyladenosine-3'-phosphate
  modified_base 7: mod_base = OTHER; note = 2'-deoxy-2'-fluorocytidine-3'-phosphate
  modified_base 8: mod_base = OTHER; note = 2'-O-methylcytidine-3'-phosphate
  modified_base 9: mod_base = OTHER; note = 2'-deoxy-2'-fluoroadenosine-3'-phosphate
  modified_base 10: mod_base = OTHER; note = 2'-O-methyladenosine-3'-phosphate
  modified_base 11: mod_base = OTHER; note = 2'-deoxy-2'-fluoroguanosine-3'-phosphate
  modified_base 12: mod_base = OTHER; note = 2'-O-methyladenosine-3'-phosphate
  modified_base 13: mod_base = OTHER; note = 2'-deoxy-2'-fluoroguanosine-3'-phosphate
  modified_base 14: mod_base = OTHER; note = 2'-O-methyluridine-3'-phosphate
  modified_base 15: mod_base = OTHER; note = 2'-deoxy-2'-fluoroadenosine-3'-phosphate
  modified_base 16: mod_base = OTHER; note = 2'-O-methyluridine-3'-phosphate
  modified_base 17: mod_base = OTHER; note = 2'-deoxy-2'-fluorouridine-3'-phosphate
  modified_base 18: mod_base = OTHER; note = 2'-O-methylcytidine-3'-phosphate
  modified_base 19: mod_base = OTHER; note = 2'-deoxy-2'-fluorocytidine-3'-phosphate
  modified_base 20: mod_base = OTHER; note = 2'-O-methyladenosine-3'-phosphorothioate
  modified_base 21: mod_base = OTHER; note = 2'-deoxy-2'-fluorouridine
atgtaaccaagagtattccat

SEQ ID NO: 253 - DNA, 21 bp, synthetic construct
  source 1..21: mol_type = other DNA
  modified_base 1: mod_base = OTHER; note = 2'-deoxy-2'-fluoroadenosine-3'-phosphate
  modified_base 2: mod_base = OTHER; note = 2'-O-methyladenosine-3'-phosphate
  modified_base 3: mod_base = OTHER; note = 2'-O-methylcytidine-3'-phosphate
  modified_base 4: mod_base = OTHER; note = 2'-O-methyladenosine-3'-phosphate
  modified_base 5: mod_base = OTHER; note = 2'-deoxy-2'-fluoroadenosine-3'-phosphate
  modified_base 6: mod_base = OTHER; note = 2'-O-methyluridine-3'-phosphate
  modified_base 7: mod_base = OTHER; note = 2'-O-methylguanosine-3'-phosphate
  modified_base 8: mod_base = OTHER; note = 2'-O-methyluridine-3'-phosphate
  modified_base 9: mod_base = OTHER; note = 2'-deoxy-2'-fluorouridine-3'-phosphate
  modified_base 10: mod_base = OTHER; note = 2'-O-methylcytidine-3'-phosphate
  modified_base 11: mod_base = OTHER; note = 2'-deoxy-2'-fluorouridine-3'-phosphate
  modified_base 12: mod_base = OTHER; note = 2'-O-methyluridine-3'-phosphate
  modified_base 13: mod_base = OTHER; note = 2'-deoxy-2'-fluoroguanosine-3'-phosphate
  modified_base 15: mod_base = OTHER; note = uridine-3'-phosphate
  modified_base 17: mod_base = OTHER; note = 2'-O-methyluridine-3'-phosphate
  modified_base 19: mod_base = OTHER; note = 2'-O-methyluridine-3'-phosphate
  modified_base 20: mod_base = OTHER; note = 2'-deoxyadenosine-3'-phosphorothioate
  modified_base 21: mod_base = OTHER; note = 2'-O-methyladenosine
  misc_feature 1..13: note = RNA
  misc_feature 15: note = RNA
  misc_feature 17: note = RNA
  misc_feature 19: note = RNA
  misc_feature 21: note = RNA
  misc_feature 14: note = DNA
  misc_feature 16: note = DNA
  misc_feature 18: note = DNA
  misc_feature 20: note = DNA
aacaatgttcttgctctataa

SEQ ID NO: 254 - RNA, 21 nt, synthetic construct
  source 1..21: mol_type = other RNA
  modified_base 1: mod_base = OTHER; note = 2'-deoxy-2'-fluoroadenosine-3'-phosphate
  modified_base 2: mod_base = OTHER; note = 2'-O-methyladenosine-3'-phosphate
  modified_base 3: mod_base = OTHER; note = 2'-deoxy-2'-fluorocytidine-3'-phosphate
  modified_base 4: mod_base = OTHER; note = 2'-O-methyladenosine-3'-phosphate
  modified_base 5: mod_base = OTHER; note = 2'-deoxy-2'-fluoroguanosine-3'-phosphate
  modified_base 6: mod_base = OTHER; note = 2'-O-methyluridine-3'-phosphate
  modified_base 7: mod_base = OTHER; note = 2'-deoxy-2'-fluoroguanosine-3'-phosphate
  modified_base 8: mod_base = OTHER; note = 2'-O-methyluridine-3'-phosphate
  modified_base 9: mod_base = OTHER; note = 2'-deoxy-2'-fluorouridine-3'-phosphate
  modified_base 10: mod_base = OTHER; note = 2'-O-methylcytidine-3'-phosphate
  modified_base 11: mod_base = OTHER; note = 2'-deoxy-2'-fluorouridine-3'-phosphate
  modified_base 12: mod_base = OTHER; note = 2'-O-methyluridine-3'-phosphate
  modified_base 13: mod_base = OTHER; note = 2'-deoxy-2'-fluoroguanosine-3'-phosphate
  modified_base 14: mod_base = OTHER; note = 2'-deoxy-2'-fluorocytidine-3'-phosphate
  modified_base 15: mod_base = OTHER; note = 2'-deoxy-2'-fluorouridine-3'-phosphate
  modified_base 16: mod_base = OTHER; note = 2'-O-methylcytidine-3'-phosphate
  modified_base 17: mod_base = OTHER; note = 2'-deoxy-2'-fluorouridine-3'-phosphate
  modified_base 18: mod_base = OTHER; note = 2'-O-methyladenosine-3'-phosphate
  modified_base 19: mod_base = OTHER; note = 2'-deoxy-2'-fluorouridine-3'-phosphate
  modified_base 20: mod_base = OTHER; note = 2'-O-methyladenosine-3'-phosphorothioate
  modified_base 21: mod_base = OTHER; note = 2'-O-methyladenosine
aacagtgttcttgctctataa

SEQ ID NO: 255 - RNA, 21 nt, synthetic construct
  source 1..21: mol_type = other RNA
  modified_base 1: mod_base = OTHER; note = 2'-deoxy-2'-fluoroadenosine-3'-phosphate
  modified_base 2: mod_base = OTHER; note = 2'-O-methyladenosine-3'-phosphate
  modified_base 3: mod_base = OTHER; note = 2'-deoxy-2'-fluorocytidine-3'-phosphate
  modified_base 4: mod_base = OTHER; note = 2'-O-methyladenosine-3'-phosphate
  modified_base 5: mod_base = OTHER; note = 2'-deoxy-2'-fluoroguanosine-3'-phosphate
  modified_base 6: mod_base = OTHER; note = 2'-O-methyluridine-3'-phosphate
  modified_base 7: mod_base = OTHER; note = 2'-deoxy-2'-fluoroguanosine-3'-phosphate
  modified_base 8: mod_base = OTHER; note = 2'-O-methyluridine-3'-phosphate
  modified_base 9: mod_base = OTHER; note = 2'-deoxy-2'-fluorouridine-3'-phosphate
  modified_base 10: mod_base = OTHER; note = 2'-O-methylcytidine-3'-phosphate
  modified_base 11: mod_base = OTHER; note = 2'-deoxy-2'-fluorouridine-3'-phosphate
  modified_base 12: mod_base = OTHER; note = 2'-O-methyluridine-3'-phosphate
  modified_base 13: mod_base = OTHER; note = 2'-O-methylguanosine-3'-phosphate
  modified_base 14: mod_base = OTHER; note = 2'-O-methylcytidine-3'-phosphate
  modified_base 15: mod_base = OTHER; note = 2'-deoxy-2'-fluorouridine-3'-phosphate
  modified_base 16: mod_base = OTHER; note = 2'-O-methylcytidine-3'-phosphate
  modified_base 17: mod_base = OTHER; note = 2'-deoxy-2'-fluorouridine-3'-phosphate
  modified_base 18: mod_base = OTHER; note = 2'-deoxy-2'-fluoroadenosine-3'-phosphate
  modified_base 19: mod_base = OTHER; note = 2'-deoxy-2'-fluorouridine-3'-phosphate
  modified_base 20: mod_base = OTHER; note = 2'-O-methyladenosine-3'-phosphorothioate
  modified_base 21: mod_base = OTHER; note = 2'-deoxy-2'-fluoroadenosine
aacagtgttcttgctctataa

SEQ ID NO: 256 - RNA, 21 nt, synthetic construct
  source 1..21: mol_type = other RNA
  modified_base 1: mod_base = OTHER; note = 2'-deoxy-2'-fluoroadenosine-3'-phosphate
  modified_base 2: mod_base = OTHER; note = 2'-O-methyladenosine-3'-phosphate
  modified_base 3: mod_base = OTHER; note = 2'-deoxy-2'-fluorocytidine-3'-phosphate
  modified_base 4: mod_base = OTHER; note = 2'-O-methyladenosine-3'-phosphate
  modified_base 5: mod_base = OTHER; note = 2'-deoxy-2'-fluoroguanosine-3'-phosphate
  modified_base 6: mod_base = OTHER; note = 2'-O-methyluridine-3'-phosphate
  modified_base 7: mod_base = OTHER; note = 2'-deoxy-2'-fluoroguanosine-3'-phosphate
  modified_base 8: mod_base = OTHER; note = 2'-O-methyluridine-3'-phosphate
  modified_base 9: mod_base = OTHER; note = 2'-deoxy-2'-fluorouridine-3'-phosphate
  modified_base 10: mod_base = OTHER; note = 2'-O-methylcytidine-3'-phosphate
  modified_base 11: mod_base = OTHER; note = 2'-deoxy-2'-fluorouridine-3'-phosphate
  modified_base 12: mod_base = OTHER; note = 2'-O-methyluridine-3'-phosphate
  modified_base 13: mod_base = OTHER; note = 2'-deoxy-2'-fluoroguanosine-3'-phosphate
  modified_base 14: mod_base = OTHER; note = 2'-O-methylcytidine-3'-phosphate
  modified_base 15: mod_base = OTHER; note = 2'-O-methyluridine-3'-phosphate
  modified_base 16: mod_base = OTHER; note = 2'-O-methylcytidine-3'-phosphate
  modified_base 17: mod_base = OTHER; note = 2'-deoxy-2'-fluorouridine-3'-phosphate
  modified_base 18: mod_base = OTHER; note = 2'-deoxy-2'-fluoroadenosine-3'-phosphate
  modified_base 19: mod_base = OTHER; note = 2'-deoxy-2'-fluorouridine-3'-phosphate
  modified_base 20: mod_base = OTHER; note = 2'-O-methyladenosine-3'-phosphorothioate
  modified_base 21: mod_base = OTHER; note = 2'-deoxy-2'-fluoroadenosine
aacagtgttcttgctctataa

SEQ ID NO: 257 - DNA, 21 bp, synthetic construct
  source 1..21: mol_type = other DNA
  modified_base 1: mod_base = OTHER; note = 2'-O-methylcytidine-3'-phosphate
  modified_base 2: mod_base = OTHER; note = adenosine-3'-phosphate
  modified_base 3: mod_base = OTHER; note = guanosine-3'-phosphate
  modified_base 4: mod_base = OTHER; note = 2'-O-methyluridine-3'-phosphate
  modified_base 5: mod_base = OTHER; note = guanosine-3'-phosphate
  modified_base 6: mod_base = OTHER; note = 2'-O-methyluridine-3'-phosphate
  modified_base 7: mod_base = OTHER; note = 2'-O-methyluridine-3'-phosphate
  modified_base 8: mod_base = OTHER; note = 2'-O-methylcytidine-3'-phosphate
  modified_base 9: mod_base = OTHER; note = 2'-O-methyluridine-3'-phosphate
  modified_base 10: mod_base = OTHER; note = 2'-O-methyluridine-3'-phosphate
  modified_base 11: mod_base = OTHER; note = guanosine-3'-phosphate
  modified_base 12: mod_base = OTHER; note = 2'-O-methylcytidine-3'-phosphate
  modified_base 13: mod_base = OTHER; note = 2'-O-methyluridine-3'-phosphate
  modified_base 14: mod_base = OTHER; note = 2'-O-methylcytidine-3'-phosphate
  modified_base 15: mod_base = OTHER; note = 2'-O-methyluridine-3'-phosphate
  modified_base 16: mod_base = OTHER; note = adenosine-3'-phosphate
  modified_base 17: mod_base = OTHER; note = 2'-O-methyluridine-3'-phosphate
  modified_base 18: mod_base = OTHER; note = adenosine-3'-phosphate
  modified_base 19: mod_base = OTHER; note = adenosine-3'-phosphate
  misc_feature 1..19: note = RNA
  misc_feature 20..21: note = DNA
cagtgttcttgctctataatt

SEQ ID NO: 258 - RNA, 21 nt, synthetic construct
  source 1..21: mol_type = other RNA
  modified_base 1: mod_base = OTHER; note = 2'-deoxy-2'-fluoroadenosine-3'-phosphate
  modified_base 2: mod_base = OTHER; note = 2'-O-methyladenosine-3'-phosphate
  modified_base 3: mod_base = OTHER; note = 2'-deoxy-2'-fluorocytidine-3'-phosphate
  modified_base 4: mod_base = OTHER; note = 2'-O-methyladenosine-3'-phosphate
  modified_base 5: mod_base = OTHER; note = 2'-deoxy-2'-fluoroguanosine-3'-phosphate
  modified_base 6: mod_base = OTHER; note = 2'-O-methyluridine-3'-phosphate
  modified_base 7: mod_base = OTHER; note = 2'-deoxy-2'-fluoroguanosine-3'-phosphate
  modified_base 8: mod_base = OTHER; note = 2'-O-methyluridine-3'-phosphate
  modified_base 9: mod_base = OTHER; note = 2'-deoxy-2'-fluorouridine-3'-phosphate
  modified_base 10: mod_base = OTHER; note = 2'-O-methylcytidine-3'-phosphate
  modified_base 11: mod_base = OTHER; note = 2'-deoxy-2'-fluorouridine-3'-phosphate
  modified_base 12: mod_base = OTHER; note = 2'-O-methyluridine-3'-phosphate
  modified_base 13: mod_base = OTHER; note = 2'-O-methylguanosine-3'-phosphate
  modified_base 14: mod_base = OTHER; note = 2'-O-methylcytidine-3'-phosphate
  modified_base 15: mod_base = OTHER; note = 2'-deoxy-2'-fluorouridine-3'-phosphate
  modified_base 16: mod_base = OTHER; note = 2'-deoxy-2'-fluorocytidine-3'-phosphate
  modified_base 17: mod_base = OTHER; note = 2'-deoxy-2'-fluorouridine-3'-phosphate
  modified_base 18: mod_base = OTHER; note = 2'-O-methyladenosine-3'-phosphate
  modified_base 19: mod_base = OTHER; note = 2'-deoxy-2'-fluorouridine-3'-phosphate
  modified_base 20: mod_base = OTHER; note = 2'-O-methyladenosine-3'-phosphorothioate
  modified_base 21: mod_base = OTHER; note = 2'-deoxy-2'-fluoroadenosine
aacagtgttcttgctctataa

SEQ ID NO: 259 - RNA, 21 nt, synthetic construct
  source 1..21: mol_type = other RNA
  modified_base 1: mod_base = OTHER; note = 2'-deoxy-2'-fluoroadenosine-3'-phosphate
  modified_base 2: mod_base = OTHER; note = 2'-O-methyladenosine-3'-phosphate
  modified_base 3: mod_base = OTHER; note = 2'-deoxy-2'-fluorocytidine-3'-phosphate
  modified_base 4: mod_base = OTHER; note = 2'-O-methyladenosine-3'-phosphate
  modified_base 5: mod_base = OTHER; note = 2'-deoxy-2'-fluoroguanosine-3'-phosphate
  modified_base 6: mod_base = OTHER; note = 2'-O-methyluridine-3'-phosphate
  modified_base 7: mod_base = OTHER; note = 2'-deoxy-2'-fluoroguanosine-3'-phosphate
  modified_base 8: mod_base = OTHER; note = 2'-O-methyluridine-3'-phosphate
  modified_base 9: mod_base = OTHER; note = 2'-deoxy-2'-fluorouridine-3'-phosphate
  modified_base 10: mod_base = OTHER; note = 2'-deoxy-2'-fluorocytidine-3'-phosphate
  modified_base 11: mod_base = OTHER; note = 2'-deoxy-2'-fluorouridine-3'-phosphate
  modified_base 12: mod_base = OTHER; note = 2'-O-methyluridine-3'-phosphate
  modified_base 13: mod_base = OTHER; note = 2'-deoxy-2'-fluoroguanosine-3'-phosphate
  modified_base 14: mod_base = OTHER; note = 2'-O-methylcytidine-3'-phosphate
  modified_base 15: mod_base = OTHER; note = 2'-deoxy-2'-fluorouridine-3'-phosphate
  modified_base 16: mod_base = OTHER; note = 2'-O-methylcytidine-3'-phosphate
  modified_base 17: mod_base = OTHER; note = 2'-deoxy-2'-fluorouridine-3'-phosphate
  modified_base 18: mod_base = OTHER; note = 2'-O-methyladenosine-3'-phosphate
  modified_base 19: mod_base = OTHER; note = 2'-deoxy-2'-fluorouridine-3'-phosphate
  modified_base 20: mod_base = OTHER; note = 2'-O-methyladenosine-3'-phosphorothioate
  modified_base 21: mod_base = OTHER; note = 2'-O-methyladenosine
aacagtgttcttgctctataa

SEQ ID NO: 260 - RNA, 21 nt, synthetic construct
  source 1..21: mol_type = other RNA
  modified_base 1: mod_base = OTHER; note = 2'-deoxy-2'-fluoroadenosine-3'-phosphate
  modified_base 2: mod_base = OTHER; note = 2'-O-methyladenosine-3'-phosphate
  modified_base 3: mod_base = OTHER; note = 2'-deoxy-2'-fluorocytidine-3'-phosphate
  modified_base 4: mod_base = OTHER; note = 2'-O-methyladenosine-3'-phosphate
  modified_base 5: mod_base = OTHER; note = 2'-deoxy-2'-fluoroguanosine-3'-phosphate
  modified_base 6: mod_base = OTHER; note = 2'-O-methyluridine-3'-phosphate
  modified_base 7: mod_base = OTHER; note = 2'-deoxy-2'-fluoroguanosine-3'-phosphate
  modified_base 8: mod_base = OTHER; note = 2'-O-methyluridine-3'-phosphate
  modified_base 9: mod_base = OTHER; note = 2'-deoxy-2'-fluorouridine-3'-phosphate
  modified_base 10: mod_base = OTHER; note = 2'-O-methylcytidine-3'-phosphate
  modified_base 11: mod_base = OTHER; note = 2'-deoxy-2'-fluorouridine-3'-phosphate
  modified_base 12: mod_base = OTHER; note = 2'-O-methyluridine-3'-phosphate
  modified_base 13: mod_base = OTHER; note = 2'-deoxy-2'-fluoroguanosine-3'-phosphate
  modified_base 14: mod_base = OTHER; note = 2'-O-methylcytidine-3'-phosphate
  modified_base 15: mod_base = OTHER; note = 2'-deoxy-2'-fluorouridine-3'-phosphate
  modified_base 16: mod_base = OTHER; note = 2'-deoxy-2'-fluorocytidine-3'-phosphate
  modified_base 17: mod_base = OTHER; note = 2'-deoxy-2'-fluorouridine-3'-phosphate
  modified_base 18: mod_base = OTHER; note = 2'-O-methyladenosine-3'-phosphate
  modified_base 19: mod_base = OTHER; note = 2'-deoxy-2'-fluorouridine-3'-phosphate
  modified_base 20: mod_base = OTHER; note = 2'-O-methyladenosine-3'-phosphorothioate
  modified_base 21: mod_base = OTHER; note = 2'-O-methyladenosine
aacagtgttcttgctctataa

SEQ ID NO: 261 - RNA, 21 nt, synthetic construct
  source 1..21: mol_type = other RNA
  modified_base 1: mod_base = OTHER; note = 2'-deoxy-2'-fluoroadenosine-3'-phosphate
  modified_base 2: mod_base = OTHER; note = 2'-O-methyladenosine-3'-phosphate
  modified_base 3: mod_base = OTHER; note = 2'-deoxy-2'-fluorocytidine-3'-phosphate
  modified_base 4: mod_base = OTHER; note = 2'-O-methyladenosine-3'-phosphate
  modified_base 5: mod_base = OTHER; note = 2'-deoxy-2'-fluoroguanosine-3'-phosphate
  modified_base 6: mod_base = OTHER; note = 2'-O-methyluridine-3'-phosphate
  modified_base 7: mod_base = OTHER; note = 2'-deoxy-2'-fluoroguanosine-3'-phosphate
  modified_base 8: mod_base = OTHER; note = 2'-O-methyluridine-3'-phosphate
  modified_base 9: mod_base = OTHER; note = 2'-deoxy-2'-fluorouridine-3'-phosphate
  modified_base 10: mod_base = OTHER; note = 2'-O-methylcytidine-3'-phosphate
  modified_base 11: mod_base = OTHER; note = 2'-deoxy-2'-fluorouridine-3'-phosphate
  modified_base 12: mod_base = OTHER; note = 2'-deoxy-2'-fluorouridine-3'-phosphate
  modified_base 13: mod_base = OTHER; note = 2'-deoxy-2'-fluoroguanosine-3'-phosphate
  modified_base 14: mod_base = OTHER; note = 2'-O-methylcytidine-3'-phosphate
  modified_base 15: mod_base = OTHER; note = 2'-deoxy-2'-fluorouridine-3'-phosphate
  modified_base 16: mod_base = OTHER; note = 2'-O-methylcytidine-3'-phosphate
  modified_base 17: mod_base = OTHER; note = 2'-deoxy-2'-fluorouridine-3'-phosphate
  modified_base 18: mod_base = OTHER; note = 2'-O-methyladenosine-3'-phosphate
  modified_base 19: mod_base = OTHER; note = 2'-deoxy-2'-fluorouridine-3'-phosphate
  modified_base 20: mod_base = OTHER; note = 2'-O-methyladenosine-3'-phosphorothioate
  modified_base 21: mod_base = OTHER; note = 2'-O-methyladenosine
aacagtgttcttgctctataa

SEQ ID NO: 262 - RNA, 21 nt, synthetic construct
  source 1..21: mol_type = other RNA
  modified_base 1: mod_base = OTHER; note = 2'-deoxy-2'-fluoroadenosine-3'-phosphate
  modified_base 2: mod_base = OTHER; note = 2'-O-methyladenosine-3'-phosphate
  modified_base 3: mod_base = OTHER; note = 2'-deoxy-2'-fluorocytidine-3'-phosphate
  modified_base 4: mod_base = OTHER; note = 2'-O-methyladenosine-3'-phosphate
  modified_base 5: mod_base = OTHER; note = 2'-deoxy-2'-fluoroguanosine-3'-phosphate
  modified_base 6: mod_base = OTHER; note = 2'-O-methyluridine-3'-phosphate
  modified_base 7: mod_base = OTHER; note = 2'-deoxy-2'-fluoroguanosine-3'-phosphate
  modified_base 8: mod_base = OTHER; note = 2'-O-methyluridine-3'-phosphate
  modified_base 9: mod_base = OTHER; note = 2'-deoxy-2'-fluorouridine-3'-phosphate
  modified_base 10: mod_base = OTHER; note = 2'-O-methylcytidine-3'-phosphate
  modified_base 11: mod_base = OTHER; note = 2'-deoxy-2'-fluorouridine-3'-phosphate
  modified_base 12: mod_base = OTHER; note = 2'-O-methyluridine-3'-phosphate
  modified_base 13: mod_base = OTHER; note = 2'-deoxy-2'-fluoroguanosine-3'-phosphate
  modified_base 14: mod_base = OTHER; note = 2'-O-methylcytidine-3'-phosphate
  modified_base 15: mod_base = OTHER; note = 2'-deoxy-2'-fluorouridine-3'-phosphate
  modified_base 16: mod_base = OTHER; note = 2'-deoxy-2'-fluorocytidine-3'-phosphate
  modified_base 17: mod_base = OTHER; note = 2'-deoxy-2'-fluorouridine-3'-phosphate
  modified_base 18: mod_base = OTHER; note = 2'-O-methyladenosine-3'-phosphate
  modified_base 19: mod_base = OTHER; note = 2'-deoxy-2'-fluorouridine-3'-phosphate
  modified_base 20: mod_base = OTHER; note = 2'-O-methyladenosine-3'-phosphorothioate
  modified_base 21: mod_base = OTHER; note = 2'-deoxy-2'-fluoroadenosine
aacagtgttcttgctctataa

SEQ ID NO: 263 - RNA, 21 nt, synthetic construct
  source 1..21: mol_type = other RNA
  modified_base 1: mod_base = OTHER; note = 2'-deoxy-2'-fluoroadenosine-3'-phosphate
  modified_base 2: mod_base = OTHER; note = 2'-O-methyladenosine-3'-phosphate
  modified_base 3: mod_base = OTHER; note = 2'-deoxy-2'-fluorocytidine-3'-phosphate
  modified_base 4: mod_base = OTHER; note = 2'-O-methyladenosine-3'-phosphate
  modified_base 5: mod_base = OTHER; note = 2'-O-methylguanosine-3'-phosphate
  modified_base 6: mod_base = OTHER; note = 2'-O-methyluridine-3'-phosphate
  modified_base 7: mod_base = OTHER; note = 2'-deoxy-2'-fluoroguanosine-3'-phosphate
  modified_base 8: mod_base = OTHER; note = 2'-O-methyluridine-3'-phosphate
  modified_base 9: mod_base = OTHER; note = 2'-deoxy-2'-fluorouridine-3'-phosphate
  modified_base 10: mod_base = OTHER; note = 2'-deoxy-2'-fluorocytidine-3'-phosphate
  modified_base 11: mod_base = OTHER; note = 2'-deoxy-2'-fluorouridine-3'-phosphate
  modified_base 12: mod_base = OTHER; note = 2'-O-methyluridine-3'-phosphate
  modified_base 13: mod_base = OTHER; note = 2'-deoxy-2'-fluoroguanosine-3'-phosphate
  modified_base 14: mod_base = OTHER; note = 2'-O-methylcytidine-3'-phosphate
  modified_base 15: mod_base = OTHER; note = 2'-deoxy-2'-fluorouridine-3'-phosphate
  modified_base 16: mod_base = OTHER; note = 2'-O-methylcytidine-3'-phosphate
  modified_base 17: mod_base = OTHER; note = 2'-deoxy-2'-fluorouridine-3'-phosphate
  modified_base 18: mod_base = OTHER; note = 2'-O-methyladenosine-3'-phosphate
  modified_base 19: mod_base = OTHER; note = 2'-deoxy-2'-fluorouridine-3'-phosphate
  modified_base 20: mod_base = OTHER; note = 2'-O-methyladenosine-3'-phosphorothioate
  modified_base 21: mod_base = OTHER; note = 2'-deoxy-2'-fluoroadenosine
aacagtgttcttgctctataa

SEQ ID NO: 264 - RNA, 21 nt, synthetic construct
  source 1..21: mol_type = other RNA
  modified_base 1: mod_base = OTHER; note = 2'-deoxy-2'-fluoroadenosine-3'-phosphate
  modified_base 2: mod_base = OTHER; note = 2'-O-methyladenosine-3'-phosphate
  modified_base 3: mod_base = OTHER; note = 2'-deoxy-2'-fluorocytidine-3'-phosphate
  modified_base 4: mod_base = OTHER; note = 2'-deoxy-2'-fluoroadenosine-3'-phosphate
  modified_base 5: mod_base = OTHER; note = 2'-deoxy-2'-fluoroguanosine-3'-phosphate
  modified_base 6: mod_base = OTHER; note = 2'-O-methyluridine-3'-phosphate
  modified_base 7: mod_base = OTHER; note = 2'-deoxy-2'-fluoroguanosine-3'-phosphate
  modified_base 8: mod_base = OTHER; note = 2'-O-methyluridine-3'-phosphate
  modified_base 9: mod_base = OTHER; note = 2'-deoxy-2'-fluorouridine-3'-phosphate
  modified_base 10: mod_base = OTHER; note = 2'-O-methylcytidine-3'-phosphate
  modified_base 11: mod_base = OTHER; note = 2'-deoxy-2'-fluorouridine-3'-phosphate
  modified_base 12: mod_base = OTHER; note = 2'-O-methyluridine-3'-phosphate
  modified_base 13: mod_base = OTHER; note = 2'-deoxy-2'-fluoroguanosine-3'-phosphate
  modified_base 14: mod_base = OTHER; note = 2'-O-methylcytidine-3'-phosphate
  modified_base 15: mod_base = OTHER; note = 2'-O-methyluridine-3'-phosphate
  modified_base 16: mod_base = OTHER; note = 2'-O-methylcytidine-3'-phosphate
  modified_base 17: mod_base = OTHER; note = 2'-deoxy-2'-fluorouridine-3'-phosphate
  modified_base 18: mod_base = OTHER; note = 2'-O-methyladenosine-3'-phosphate
  modified_base 19: mod_base = OTHER; note = 2'-deoxy-2'-fluorouridine-3'-phosphate
  modified_base 20: mod_base = OTHER; note = 2'-O-methyladenosine-3'-phosphorothioate
  modified_base 21: mod_base = OTHER; note = 2'-deoxy-2'-fluoroadenosine
aacagtgttcttgctctataa

SEQ ID NO: 265 - RNA, 21 nt, synthetic construct
  source 1..21: mol_type = other RNA
  modified_base 1: mod_base = OTHER; note = 2'-deoxy-2'-fluoroadenosine-3'-phosphate
  modified_base 2: mod_base = OTHER; note = 2'-O-methyladenosine-3'-phosphate
  modified_base 3: mod_base = OTHER; note = 2'-O-methylcytidine-3'-phosphate
  modified_base 4: mod_base = OTHER; note = 2'-O-methyladenosine-3'-phosphate
  modified_base 5: mod_base = OTHER; note = 2'-deoxy-2'-fluoroguanosine-3'-phosphate
  modified_base 6: mod_base = OTHER; note = 2'-O-methyluridine-3'-phosphate
  modified_base 7: mod_base = OTHER; note = 2'-deoxy-2'-fluoroguanosine-3'-phosphate
  modified_base 8: mod_base = OTHER; note = 2'-O-methyluridine-3'-phosphate
  modified_base 9: mod_base = OTHER; note = 2'-deoxy-2'-fluorouridine-3'-phosphate
  modified_base 10: mod_base = OTHER; note = 2'-deoxy-2'-fluorocytidine-3'-phosphate
  modified_base 11: mod_base = OTHER; note = 2'-deoxy-2'-fluorouridine-3'-phosphate
  modified_base 12: mod_base = OTHER; note = 2'-O-methyluridine-3'-phosphate
  modified_base 13: mod_base = OTHER; note = 2'-deoxy-2'-fluoroguanosine-3'-phosphate
  modified_base 14: mod_base = OTHER; note = 2'-O-methylcytidine-3'-phosphate
  modified_base 15: mod_base = OTHER; note = 2'-deoxy-2'-fluorouridine-3'-phosphate
  modified_base 16: mod_base = OTHER; note = 2'-O-methylcytidine-3'-phosphate
  modified_base 17: mod_base = OTHER; note = 2'-deoxy-2'-fluorouridine-3'-phosphate
  modified_base 18: mod_base = OTHER; note = 2'-O-methyladenosine-3'-phosphate
  modified_base 19: mod_base = OTHER; note = 2'-deoxy-2'-fluorouridine-3'-phosphate
  modified_base 20: mod_base = OTHER; note = 2'-O-methyladenosine-3'-phosphorothioate
  modified_base 21: mod_base = OTHER; note = 2'-deoxy-2'-fluoroadenosine
aacagtgttcttgctctataa

SEQ ID NO: 266 - RNA, 21 nt, synthetic construct
  source 1..21: mol_type = other RNA
  modified_base 1: mod_base = OTHER; note = 2'-deoxy-2'-fluoroadenosine-3'-phosphate
  modified_base 2: mod_base = OTHER; note = 2'-O-methyladenosine-3'-phosphate
  modified_base 3: mod_base = OTHER; note = 2'-O-methylcytidine-3'-phosphate
  modified_base 4: mod_base = OTHER; note = 2'-O-methyladenosine-3'-phosphate
  modified_base 5: mod_base = OTHER; note = 2'-deoxy-2'-fluoroguanosine-3'-phosphate
  modified_base 6: mod_base = OTHER; note = 2'-O-methyluridine-3'-phosphate
  modified_base 7: mod_base = OTHER; note = 2'-deoxy-2'-fluoroguanosine-3'-phosphate
  modified_base 8: mod_base = OTHER; note = 2'-O-methyluridine-3'-phosphate
  modified_base 9: mod_base = OTHER; note = 2'-deoxy-2'-fluorouridine-3'-phosphate
  modified_base 10: mod_base = OTHER; note = 2'-O-methylcytidine-3'-phosphate
  modified_base 11: mod_base = OTHER; note = 2'-deoxy-2'-fluorouridine-3'-phosphate
  modified_base 12: mod_base = OTHER; note = 2'-O-methyluridine-3'-phosphate
  modified_base 13: mod_base = OTHER; note = 2'-deoxy-2'-fluoroguanosine-3'-phosphate
  modified_base 14: mod_base = OTHER; note = 2'-O-methylcytidine-3'-phosphate
  modified_base 15: mod_base = OTHER; note = 2'-deoxy-2'-fluorouridine-3'-phosphate
  modified_base 16: mod_base = OTHER; note = 2'-deoxy-2'-fluorocytidine-3'-phosphate
  modified_base 17: mod_base = OTHER; note = 2'-deoxy-2'-fluorouridine-3'-phosphate
  modified_base 18: mod_base = OTHER; note = 2'-O-methyladenosine-3'-phosphate
  modified_base 19: mod_base = OTHER; note = 2'-deoxy-2'-fluorouridine-3'-phosphate
  modified_base 20: mod_base = OTHER; note = 2'-O-methyladenosine-3'-phosphorothioate
  modified_base 21: mod_base = OTHER; note = 2'-deoxy-2'-fluoroadenosine
aacagtgttcttgctctataa

SEQ ID NO: 267 - RNA, 21 nt, synthetic construct
  source 1..21: mol_type = other RNA
  modified_base 1: mod_base = OTHER; note = 2'-deoxy-2'-fluoroadenosine-3'-phosphate
  modified_base 2: mod_base = OTHER; note = 2'-O-methyladenosine-3'-phosphate
  modified_base 3: mod_base = OTHER; note = 2'-deoxy-2'-fluorocytidine-3'-phosphate
  modified_base 4: mod_base = OTHER; note = 2'-O-methyladenosine-3'-phosphate
  modified_base 5: mod_base = OTHER; note = 2'-deoxy-2'-fluoroguanosine-3'-phosphate
  modified_base 6: mod_base = OTHER; note = 2'-O-methyluridine-3'-phosphate
  modified_base 7: mod_base = OTHER; note = 2'-deoxy-2'-fluoroguanosine-3'-phosphate
  modified_base 8: mod_base = OTHER; note = 2'-O-methyluridine-3'-phosphate
  modified_base 9: mod_base = OTHER; note = 2'-deoxy-2'-fluorouridine-3'-phosphate
  modified_base 10: mod_base = OTHER; note = 2'-O-methylcytidine-3'-phosphate
  modified_base 11: mod_base = OTHER; note = 2'-deoxy-2'-fluorouridine-3'-phosphate
  modified_base 12: mod_base = OTHER; note = 2'-O-methyluridine-3'-phosphate
  modified_base 13: mod_base = OTHER; note = 2'-deoxy-2'-fluoroguanosine-3'-phosphate
  modified_base 14: mod_base = OTHER; note = 2'-O-methylcytidine-3'-phosphate
  modified_base 15: mod_base = OTHER; note = 2'-O-methyluridine-3'-phosphate
  modified_base 16: mod_base = OTHER; note = 2'-O-methylcytidine-3'-phosphate
  modified_base 17: mod_base = OTHER; note = 2'-deoxy-2'-fluorouridine-3'-phosphate
  modified_base 18: mod_base = OTHER; note = 2'-O-methyladenosine-3'-phosphate
  modified_base 19: mod_base = OTHER; note = 2'-deoxy-2'-fluorouridine-3'-phosphate
  modified_base 20: mod_base = OTHER; note = 2'-O-methyladenosine-3'-phosphorothioate
  modified_base 21: mod_base = OTHER; note = 2'-deoxy-2'-fluoroadenosine
aacagtgttcttgctctataa

SEQ ID NO: 268 - DNA, 21 bp, synthetic construct
  source 1..21: mol_type = other DNA
  modified_base 1: mod_base = OTHER; note = 2'-O-methylcytidine-3'-phosphate
  modified_base 2: mod_base = OTHER; note = adenosine-3'-phosphate
  modified_base 3: mod_base = OTHER; note = guanosine-3'-phosphate
  modified_base 4: mod_base = OTHER; note = 2'-O-methyluridine-3'-phosphate
  modified_base 5: mod_base = OTHER; note = guanosine-3'-phosphate
  modified_base 6: mod_base = OTHER; note = 2'-O-methyluridine-3'-phosphate
  modified_base 7: mod_base = OTHER; note = 2'-O-methyluridine-3'-phosphate
  modified_base 8: mod_base = OTHER; note = 2'-O-methylcytidine-3'-phosphate
  modified_base 9: mod_base = OTHER; note = 2'-O-methyluridine-3'-phosphate
  modified_base 10: mod_base = OTHER; note = 2'-O-methyluridine-3'-phosphate
  modified_base 11: mod_base = OTHER; note = guanosine-3'-phosphate
  modified_base 12: mod_base = OTHER; note = 2'-O-methylcytidine-3'-phosphate
  modified_base 13: mod_base = OTHER; note = 2'-O-methyluridine-3'-phosphate
  modified_base 14: mod_base = OTHER; note = 2'-O-methylcytidine-3'-phosphate
  modified_base 15: mod_base = OTHER; note = 2'-O-methyluridine-3'-phosphate
  modified_base 16: mod_base = OTHER; note = adenosine-3'-phosphate
  modified_base 17: mod_base = OTHER; note = 2'-O-methyluridine-3'-phosphate
  modified_base 18: mod_base = OTHER; note = adenosine-3'-phosphate
  modified_base 19: mod_base = OTHER; note = adenosine-3'-phosphate
  misc_feature 1..19: note = RNA
  misc_feature 20..21: note = DNA
cagtgttcttgctctataatt

SEQ ID NO: 269 - RNA, 21 nt, synthetic construct
  source 1..21: mol_type = other RNA
  modified_base 1: mod_base = OTHER; note = 2'-deoxy-2'-fluoroadenosine-3'-phosphate
  modified_base 2: mod_base = OTHER; note = 2'-O-methyladenosine-3'-phosphate
  modified_base 3: mod_base = OTHER; note = 2'-deoxy-2'-fluorocytidine-3'-phosphate
  modified_base 4: mod_base = OTHER; note = 2'-O-methyladenosine-3'-phosphate
  modified_base 5: mod_base = OTHER; note = 2'-deoxy-2'-fluoroguanosine-3'-phosphate
  modified_base 6: mod_base = OTHER; note = 2'-O-methyluridine-3'-phosphate
  modified_base 7: mod_base = OTHER; note = 2'-deoxy-2'-fluoroguanosine-3'-phosphate
  modified_base 8: mod_base = OTHER; note = 2'-O-methyluridine-3'-phosphate
  modified_base 9: mod_base = OTHER; note = 2'-deoxy-2'-fluorouridine-3'-phosphate
  modified_base 10: mod_base = OTHER; note = 2'-O-methylcytidine-3'-phosphate
  modified_base 11: mod_base = OTHER; note = 2'-deoxy-2'-fluorouridine-3'-phosphate
  modified_base 12: mod_base = OTHER; note = 2'-O-methyluridine-3'-phosphate
  modified_base 13: mod_base = OTHER; note = 2'-deoxy-2'-fluoroguanosine-3'-phosphate
  modified_base 14: mod_base = OTHER; note = 2'-deoxy-2'-fluorocytidine-3'-phosphate
  modified_base 15: mod_base = OTHER; note = 2'-deoxy-2'-fluorouridine-3'-phosphate
  modified_base 16: mod_base = OTHER; note = 2'-O-methylcytidine-3'-phosphate
  modified_base 17: mod_base = OTHER; note = 2'-deoxy-2'-fluorouridine-3'-phosphate
  modified_base 18: mod_base = OTHER; note = 2'-O-methyladenosine-3'-phosphate
  modified_base 19: mod_base = OTHER; note = 2'-O-methyluridine-3'-phosphate
  modified_base 20: mod_base = OTHER; note = 2'-O-methyladenosine-3'-phosphorothioate
  modified_base 21: mod_base = OTHER; note = 2'-deoxy-2'-fluoroadenosine
aacagtgttcttgctctataa

SEQ ID NO: 270 - RNA, 21 nt, synthetic construct
  source 1..21: mol_type = other RNA
  modified_base 1: mod_base = OTHER; note = 2'-deoxy-2'-fluoroadenosine-3'-phosphate
  modified_base 2: mod_base = OTHER; note = 2'-O-methyladenosine-3'-phosphate
  modified_base 3: mod_base = OTHER; note = 2'-deoxy-2'-fluorocytidine-3'-phosphate
  modified_base 4: mod_base = OTHER; note = 2'-O-methyladenosine-3'-phosphate
  modified_base 5: mod_base = OTHER; note = 2'-deoxy-2'-fluoroguanosine-3'-phosphate
  modified_base 6: mod_base = OTHER; note = 2'-O-methyluridine-3'-phosphate
  modified_base 7: mod_base = OTHER; note = 2'-O-methylguanosine-3'-phosphate
  modified_base 8: mod_base = OTHER; note = 2'-O-methyluridine-3'-phosphate
  modified_base 9: mod_base = OTHER; note = 2'-deoxy-2'-fluorouridine-3'-phosphate
  modified_base 10: mod_base = OTHER; note = 2'-deoxy-2'-fluorocytidine-3'-phosphate
  modified_base 11: mod_base = OTHER; note = 2'-deoxy-2'-fluorouridine-3'-phosphate
  modified_base 12: mod_base = OTHER; note = 2'-O-methyluridine-3'-phosphate
  modified_base 13: mod_base = OTHER; note = 2'-deoxy-2'-fluoroguanosine-3'-phosphate
  modified_base 14: mod_base = OTHER; note = 2'-O-methylcytidine-3'-phosphate
  modified_base 15: mod_base = OTHER; note = 2'-deoxy-2'-fluorouridine-3'-phosphate
  modified_base 16: mod_base = OTHER; note = 2'-O-methylcytidine-3'-phosphate
  modified_base 17: mod_base = OTHER; note = 2'-deoxy-2'-fluorouridine-3'-phosphate
  modified_base 18: mod_base = OTHER; note = 2'-O-methyladenosine-3'-phosphate
  modified_base 19: mod_base = OTHER; note = 2'-deoxy-2'-fluorouridine-3'-phosphate
  modified_base 20: mod_base = OTHER; note = 2'-O-methyladenosine-3'-phosphorothioate
  modified_base 21: mod_base = OTHER; note = 2'-deoxy-2'-fluoroadenosine
aacagtgttcttgctctataa

SEQ ID NO: 271 - RNA, 21 nt, synthetic construct
  source 1..21: mol_type = other RNA
  modified_base 1: mod_base = OTHER; note = 2'-deoxy-2'-fluoroadenosine-3'-phosphate
  modified_base 2: mod_base = OTHER; note = 2'-O-methyladenosine-3'-phosphate
  modified_base 3: mod_base = OTHER; note = 2'-O-methylcytidine-3'-phosphate
  modified_base 4: mod_base = OTHER; note = 2'-O-methyladenosine-3'-phosphate
  modified_base 5: mod_base = OTHER; note = 2'-deoxy-2'-fluoroguanosine-3'-phosphate
  modified_base 6: mod_base = OTHER; note = 2'-O-methyluridine-3'-phosphate
  modified_base 7: mod_base = OTHER; note = 2'-deoxy-2'-fluoroguanosine-3'-phosphate
  modified_base 8: mod_base = OTHER; note = 2'-O-methyluridine-3'-phosphate
  modified_base 9: mod_base = OTHER; note = 2'-deoxy-2'-fluorouridine-3'-phosphate
  modified_base 10: mod_base = OTHER; note = 2'-O-methylcytidine-3'-phosphate
  modified_base 11: mod_base = OTHER; note = 2'-deoxy-2'-fluorouridine-3'-phosphate
  modified_base 12: mod_base = OTHER; note = 2'-O-methyluridine-3'-phosphate
  modified_base 13: mod_base = OTHER; note = 2'-deoxy-2'-fluoroguanosine-3'-phosphate
  modified_base 14: mod_base = OTHER; note = 2'-O-methylcytidine-3'-phosphate
  modified_base 15: mod_base = OTHER; note = 2'-deoxy-2'-fluorouridine-3'-phosphate
  modified_base 16: mod_base = OTHER; note = 2'-O-methylcytidine-3'-phosphate
  modified_base 17: mod_base = OTHER; note = 2'-deoxy-2'-fluorouridine-3'-phosphate
  modified_base 18: mod_base = OTHER; note = 2'-deoxy-2'-fluoroadenosine-3'-phosphate
  modified_base 19: mod_base = OTHER; note = 2'-deoxy-2'-fluorouridine-3'-phosphate
  modified_base 20: mod_base = OTHER; note = 2'-O-methyladenosine-3'-phosphorothioate
  modified_base 21: mod_base = OTHER; note = 2'-deoxy-2'-fluoroadenosine
aacagtgttcttgctctataa

SEQ ID NO: 272 - DNA, 21 bp, synthetic construct
  source 1..21: mol_type = other DNA
  modified_base 1: mod_base = OTHER; note = 2'-deoxy-2'-fluoroadenosine-3'-phosphate
  modified_base 2: mod_base = OTHER; note = 2'-O-methyladenosine-3'-phosphate
  modified_base 3: mod_base = OTHER; note = 2'-O-methylcytidine-3'-phosphate
  modified_base 4: mod_base = OTHER; note = 2'-O-methyladenosine-3'-phosphate
  modified_base 5: mod_base = OTHER; note = 2'-deoxy-2'-fluoroadenosine-3'-phosphate
  modified_base 6: mod_base = OTHER; note = 2'-O-methyluridine-3'-phosphate
  modified_base 7: mod_base = OTHER; note = 2'-O-methylguanosine-3'-phosphate
  modified_base 8: mod_base = OTHER; note = 2'-O-methyluridine-3'-phosphate
  modified_base 9: mod_base = OTHER; note = 2'-deoxy-2'-fluorouridine-3'-phosphate
  modified_base 10: mod_base = OTHER; note = 2'-O-methylcytidine-3'-phosphate
  modified_base 11: mod_base = OTHER; note = 2'-deoxy-2'-fluorouridine-3'-phosphate
  modified_base 12: mod_base = OTHER; note = 2'-O-methyluridine-3'-phosphate
  modified_base 13: mod_base = OTHER; note = 2'-deoxy-2'-fluoroguanosine-3'-phosphate
  modified_base 15: mod_base = OTHER; note = 2'-O-methyluridine-3'-phosphate
  modified_base 17: mod_base = OTHER; note = 2'-O-methyluridine-3'-phosphate
  modified_base 19: mod_base = OTHER; note = 2'-O-methyluridine-3'-phosphate
  modified_base 20: mod_base = OTHER; note = 2'-deoxyadenosine-3'-phosphorothioate
  modified_base 21: mod_base = OTHER; note = 2'-O-methyladenosine
  misc_feature 1..13: note = RNA
  misc_feature 15: note = RNA
  misc_feature 17: note = RNA
  misc_feature 19: note = RNA
  misc_feature 21: note = RNA
  misc_feature 14: note = DNA
  misc_feature 16: note = DNA
  misc_feature 18: note = DNA
  misc_feature 20: note = DNA
aacaatgttcttgctctataa

SEQ ID NO: 273 - RNA, 21 nt, synthetic construct
  source 1..21: mol_type = other RNA
  modified_base 1: mod_base = OTHER; note = 2'-deoxy-2'-fluoroadenosine-3'-phosphate
  modified_base 2: mod_base = OTHER; note = 2'-O-methyladenosine-3'-phosphate
  modified_base 3: mod_base = OTHER; note = 2'-deoxy-2'-fluorocytidine-3'-phosphate
  modified_base 4: mod_base = OTHER; note = 2'-O-methyladenosine-3'-phosphate
  modified_base 5: mod_base = OTHER; note = 2'-deoxy-2'-fluoroguanosine-3'-phosphate
  modified_base 6: mod_base = OTHER; note = 2'-O-methyluridine-3'-phosphate
  modified_base 7: mod_base = OTHER; note = 2'-deoxy-2'-fluoroguanosine-3'-phosphate
  modified_base 8: mod_base = OTHER; note = 2'-O-methyluridine-3'-phosphate
  modified_base 9: mod_base = OTHER; note = 2'-deoxy-2'-fluorouridine-3'-phosphate
  modified_base 10: mod_base = OTHER; note = 2'-deoxy-2'-fluorocytidine-3'-phosphate
  modified_base 11: mod_base = OTHER; note = 2'-deoxy-2'-fluorouridine-3'-phosphate
  modified_base 12: mod_base = OTHER; note = 2'-O-methyluridine-3'-phosphate
  modified_base 13: mod_base = OTHER; note = 2'-deoxy-2'-fluoroguanosine-3'-phosphate
  modified_base 14: mod_base = OTHER; note = 2'-O-methylcytidine-3'-phosphate
  modified_base 15: mod_base = OTHER; note = 2'-O-methyluridine-3'-phosphate
  modified_base 16: mod_base = OTHER; note = 2'-O-methylcytidine-3'-phosphate
  modified_base 17: mod_base = OTHER; note = 2'-deoxy-2'-fluorouridine-3'-phosphate
  modified_base 18: mod_base = OTHER; note = 2'-O-methyladenosine-3'-phosphate
  modified_base 19: mod_base = OTHER; note = 2'-deoxy-2'-fluorouridine-3'-phosphate
  modified_base 20: mod_base = OTHER; note = 2'-O-methyladenosine-3'-phosphorothioate
  modified_base 21: mod_base = OTHER; note = 2'-deoxy-2'-fluoroadenosine
aacagtgttcttgctctataa

SEQ ID NO: 274 - DNA, 21 bp, synthetic construct
  source 1..21: mol_type = other DNA
  modified_base 1: mod_base = OTHER; note = 2'-O-methylcytidine-3'-phosphate
  modified_base 2: mod_base = OTHER; note = adenosine-3'-phosphate
  modified_base 3: mod_base = OTHER; note = guanosine-3'-phosphate
  modified_base 4: mod_base = OTHER; note = 2'-O-methyluridine-3'-phosphate
  modified_base 5: mod_base = OTHER; note = guanosine-3'-phosphate
  modified_base 6: mod_base = OTHER; note = 2'-O-methyluridine-3'-phosphate
  modified_base 7: mod_base = OTHER; note = 2'-O-methyluridine-3'-phosphate
  modified_base 8: mod_base = OTHER; note = 2'-O-methylcytidine-3'-phosphate
  modified_base 9: mod_base = OTHER; note = 2'-O-methyluridine-3'-phosphate
  modified_base 10: mod_base = OTHER; note = 2'-O-methyluridine-3'-phosphate
  modified_base 11: mod_base = OTHER; note = guanosine-3'-phosphate
  modified_base 12: mod_base = OTHER; note = 2'-O-methylcytidine-3'-phosphate
  modified_base 13: mod_base = OTHER; note = 2'-O-methyluridine-3'-phosphate
  modified_base 14: mod_base = OTHER; note = 2'-O-methylcytidine-3'-phosphate
  modified_base 15: mod_base = OTHER; note = 2'-O-methyluridine-3'-phosphate
  modified_base 16: mod_base = OTHER; note = adenosine-3'-phosphate
  modified_base 17: mod_base = OTHER; note = 2'-O-methyluridine-3'-phosphate
  modified_base 18: mod_base = OTHER; note = adenosine-3'-phosphate
  modified_base 19: mod_base = OTHER; note = adenosine-3'-phosphate
  misc_feature 1..19: note = RNA
  misc_feature 20..21: note = DNA
cagtgttcttgctctataatt

SEQ ID NO: 275 - RNA, 21 nt, synthetic construct
  source 1..21: mol_type = other RNA
  modified_base 1: mod_base = OTHER; note = 2'-O-methyladenosine-3'-phosphate
  modified_base 2: mod_base = OTHER; note = 2'-O-methyladenosine-3'-phosphate
  modified_base 3: mod_base = OTHER; note = 2'-deoxy-2'-fluorocytidine-3'-phosphate
  modified_base 4: mod_base = OTHER; note = 2'-O-methyladenosine-3'-phosphate
  modified_base 5: mod_base = OTHER; note = 2'-deoxy-2'-fluoroguanosine-3'-phosphate
  modified_base 6: mod_base = OTHER; note = 2'-O-methyluridine-3'-phosphate
  modified_base 7: mod_base = OTHER; note = 2'-deoxy-2'-fluoroguanosine-3'-phosphate
  modified_base 8: mod_base = OTHER; note = 2'-O-methyluridine-3'-phosphate
  modified_base 9: mod_base = OTHER; note = 2'-deoxy-2'-fluorouridine-3'-phosphate
  modified_base 10: mod_base = OTHER; note = 2'-O-methylcytidine-3'-phosphate
  modified_base 11: mod_base = OTHER; note = 2'-deoxy-2'-fluorouridine-3'-phosphate
  modified_base 12: mod_base = OTHER; note = 2'-O-methyluridine-3'-phosphate
  modified_base 13: mod_base = OTHER; note = 2'-deoxy-2'-fluoroguanosine-3'-phosphate
  modified_base 14: mod_base = OTHER; note = 2'-O-methylcytidine-3'-phosphate
  modified_base 15: mod_base = OTHER; note = 2'-deoxy-2'-fluorouridine-3'-phosphate
  modified_base 16: mod_base = OTHER; note = 2'-deoxy-2'-fluorocytidine-3'-phosphate
  modified_base 17: mod_base = OTHER; note = 2'-deoxy-2'-fluorouridine-3'-phosphate
  modified_base 18: mod_base = OTHER; note = 2'-O-methyladenosine-3'-phosphate
  modified_base 19: mod_base = OTHER; note = 2'-deoxy-2'-fluorouridine-3'-phosphate
  modified_base 20: mod_base = OTHER; note = 2'-O-methyladenosine-3'-phosphorothioate
  modified_base 21: mod_base = OTHER; note = 2'-deoxy-2'-fluoroadenosine
aacagtgttcttgctctataa

SEQ ID NO: 276 - RNA, 21 nt, synthetic construct
  source 1..21: mol_type = other RNA
  modified_base 1: mod_base = OTHER; note = 2'-deoxy-2'-fluoroadenosine-3'-phosphate
  modified_base 2: mod_base = OTHER; note = 2'-O-methyladenosine-3'-phosphate
  modified_base 3: mod_base = OTHER; note = 2'-deoxy-2'-fluorocytidine-3'-phosphate
  modified_base 4: mod_base = OTHER; note = 2'-O-methyladenosine-3'-phosphate
  modified_base 5: mod_base = OTHER; note = 2'-deoxy-2'-fluoroguanosine-3'-phosphate
  modified_base 6: mod_base = OTHER; note = 2'-deoxy-2'-fluorouridine-3'-phosphate
  modified_base 7: mod_base = OTHER; note = 2'-deoxy-2'-fluoroguanosine-3'-phosphate
  modified_base 8: mod_base = OTHER; note = 2'-O-methyluridine-3'-phosphate
  modified_base 9: mod_base = OTHER; note = 2'-deoxy-2'-fluorouridine-3'-phosphate
  modified_base 10: mod_base = OTHER; note = 2'-O-methylcytidine-3'-phosphate
  modified_base 11: mod_base = OTHER; note = 2'-deoxy-2'-fluorouridine-3'-phosphate
  modified_base 12: mod_base = OTHER; note = 2'-O-methyluridine-3'-phosphate
  modified_base 13: mod_base = OTHER; note = 2'-deoxy-2'-fluoroguanosine-3'-phosphate
  modified_base 14: mod_base = OTHER; note = 2'-O-methylcytidine-3'-phosphate
  modified_base 15: mod_base = OTHER; note = 2'-O-methyluridine-3'-phosphate
  modified_base 16: mod_base = OTHER; note = 2'-O-methylcytidine-3'-phosphate
  modified_base 17: mod_base = OTHER; note = 2'-deoxy-2'-fluorouridine-3'-phosphate
  modified_base 18: mod_base = OTHER; note = 2'-O-methyladenosine-3'-phosphate
  modified_base 19: mod_base = OTHER; note = 2'-deoxy-2'-fluorouridine-3'-phosphate
  modified_base 20: mod_base = OTHER; note = 2'-O-methyladenosine-3'-phosphorothioate
  modified_base 21: mod_base = OTHER; note = 2'-deoxy-2'-fluoroadenosine
aacagtgttcttgctctataa

SEQ ID NO: 277 - DNA, 21 bp, synthetic construct
  source 1..21: mol_type = other DNA
  modified_base 1: mod_base = OTHER; note = 2'-O-methylcytidine-3'-phosphate
  modified_base 2: mod_base = OTHER; note = adenosine-3'-phosphate
  modified_base 3: mod_base = OTHER; note = guanosine-3'-phosphate
  modified_base 4: mod_base = OTHER; note = 2'-O-methyluridine-3'-phosphate
  modified_base 5: mod_base = OTHER; note = guanosine-3'-phosphate
  modified_base 6: mod_base = OTHER; note = 2'-O-methyluridine-3'-phosphate
  modified_base 7: mod_base = OTHER; note = 2'-O-methyluridine-3'-phosphate
  modified_base 8: mod_base = OTHER; note = 2'-O-methylcytidine-3'-phosphate
  modified_base 9: mod_base = OTHER; note = 2'-O-methyluridine-3'-phosphate
  modified_base 10: mod_base = OTHER; note = 2'-O-methyluridine-3'-phosphate
  modified_base 11: mod_base = OTHER; note = guanosine-3'-phosphate
  modified_base 12: mod_base = OTHER; note = 2'-O-methylcytidine-3'-phosphate
  modified_base 13: mod_base = OTHER; note = 2'-O-methyluridine-3'-phosphate
  modified_base 14: mod_base = OTHER; note = 2'-O-methylcytidine-3'-phosphate
  modified_base 15: mod_base = OTHER; note = 2'-O-methyluridine-3'-phosphate
  modified_base 16: mod_base = OTHER; note = adenosine-3'-phosphate
  modified_base 17: mod_base = OTHER; note = 2'-O-methyluridine-3'-phosphate
  modified_base 18: mod_base = OTHER; note = adenosine-3'-phosphate
  modified_base 19: mod_base = OTHER; note = adenosine-3'-phosphate
  misc_feature 1..19: note = RNA
  misc_feature 20..21: note = DNA
cagtgttcttgctctataatt

SEQ ID NO: 278 - RNA, 21 nt, synthetic construct
  source 1..21: mol_type = other RNA
  modified_base 1: mod_base = OTHER; note = 2'-deoxy-2'-fluoroadenosine-3'-phosphate
  modified_base 2: mod_base = OTHER; note = 2'-O-methyladenosine-3'-phosphate
  modified_base 3: mod_base = OTHER; note = 2'-deoxy-2'-fluorocytidine-3'-phosphate
  modified_base 4: mod_base = OTHER; note = 2'-O-methyladenosine-3'-phosphate
  modified_base 5: mod_base = OTHER; note = 2'-deoxy-2'-fluoroguanosine-3'-phosphate
  modified_base 6: mod_base = OTHER; note = 2'-deoxy-2'-fluorouridine-3'-phosphate
  modified_base 7: mod_base = OTHER; note = 2'-deoxy-2'-fluoroguanosine-3'-phosphate
  modified_base 8: mod_base = OTHER; note = 2'-O-methyluridine-3'-phosphate
  modified_base 9: mod_base = OTHER; note = 2'-deoxy-2'-fluorouridine-3'-phosphate
  modified_base 10: mod_base = OTHER; note = 2'-O-methylcytidine-3'-phosphate
  modified_base 11: mod_base = OTHER; note = 2'-deoxy-2'-fluorouridine-3'-phosphate
  modified_base 12: mod_base = OTHER; note = 2'-O-methyluridine-3'-phosphate
  modified_base 13: mod_base = OTHER; note = 2'-deoxy-2'-fluoroguanosine-3'-phosphate
  modified_base 14: mod_base = OTHER; note = 2'-O-methylcytidine-3'-phosphate
  modified_base 15: mod_base = OTHER; note = 2'-deoxy-2'-fluorouridine-3'-phosphate
  modified_base 16: mod_base = OTHER; note = 2'-O-methylcytidine-3'-phosphate
  modified_base 17: mod_base = OTHER; note = 2'-deoxy-2'-fluorouridine-3'-phosphate
  modified_base 18: mod_base = OTHER; note = 2'-O-methyladenosine-3'-phosphate
  modified_base 19: mod_base = OTHER; note = 2'-deoxy-2'-fluorouridine-3'-phosphate
  modified_base 20: mod_base = OTHER; note = 2'-O-methyladenosine-3'-phosphorothioate
  modified_base 21: mod_base = OTHER; note = 2'-deoxy-2'-fluoroadenosine
aacagtgttcttgctctataa

SEQ ID NO: 279 - RNA, 21 nt, synthetic construct
  source 1..21: mol_type = other RNA
  modified_base 1: mod_base = OTHER; note = 2'-deoxy-2'-fluoroadenosine-3'-phosphate
  modified_base 2: mod_base = OTHER; note = 2'-O-methyladenosine-3'-phosphate
  modified_base 3: mod_base = OTHER; note = 2'-deoxy-2'-fluorocytidine-3'-phosphate
  modified_base 4: mod_base = OTHER; note = 2'-O-methyladenosine-3'-phosphate
  modified_base 5: mod_base = OTHER; note = 2'-deoxy-2'-fluoroguanosine-3'-phosphate
  modified_base 6: mod_base = OTHER; note = 2'-O-methyluridine-3'-phosphate
  modified_base 7: mod_base = OTHER; note = 2'-deoxy-2'-fluoroguanosine-3'-phosphate
  modified_base 8: mod_base = OTHER; note = 2'-O-methyluridine-3'-phosphate
  modified_base 9: mod_base = OTHER; note = 2'-deoxy-2'-fluorouridine-3'-phosphate
  modified_base 10: mod_base = OTHER; note = 2'-deoxy-2'-fluorocytidine-3'-phosphate
  modified_base 11: mod_base = OTHER; note = 2'-deoxy-2'-fluorouridine-3'-phosphate
  modified_base 12: mod_base = OTHER; note = 2'-O-methyluridine-3'-phosphate
  modified_base 13: mod_base = OTHER; note = 2'-deoxy-2'-fluoroguanosine-3'-phosphate
  modified_base 14: mod_base = OTHER; note = 2'-O-methylcytidine-3'-phosphate
  modified_base 15: mod_base = OTHER; note = 2'-deoxy-2'-fluorouridine-3'-phosphate
  modified_base 16: mod_base = OTHER; note = 2'-O-methylcytidine-3'-phosphate
  modified_base 17: mod_base = OTHER; note = 2'-O-methyluridine-3'-phosphate
  modified_base 18: mod_base = OTHER; note = 2'-O-methyladenosine-3'-phosphate
  modified_base 19: mod_base = OTHER; note = 2'-deoxy-2'-fluorouridine-3'-phosphate
  modified_base 20: mod_base = OTHER; note = 2'-O-methyladenosine-3'-phosphorothioate
  modified_base 21: mod_base = OTHER; note = 2'-deoxy-2'-fluoroadenosine
aacagtgttcttgctctataa

SEQ ID NO: 280 - DNA, 21 bp, synthetic construct
  source 1..21: mol_type = other DNA
  modified_base 1: mod_base = OTHER; note = 2'-O-methylcytidine-3'-phosphate
  modified_base 2: mod_base = OTHER; note = adenosine-3'-phosphate
  modified_base 3: mod_base = OTHER; note = guanosine-3'-phosphate
  modified_base 4: mod_base = OTHER; note = 2'-O-methyluridine-3'-phosphate
  modified_base 5: mod_base = OTHER; note = guanosine-3'-phosphate
  modified_base 6: mod_base = OTHER; note = 2'-O-methyluridine-3'-phosphate
  modified_base 7: mod_base = OTHER; note = 2'-O-methyluridine-3'-phosphate
  modified_base 8: mod_base = OTHER; note = 2'-O-methylcytidine-3'-phosphate
  modified_base 9: mod_base = OTHER; note = 2'-O-methyluridine-3'-phosphate
  modified_base 10: mod_base = OTHER; note = 2'-O-methyluridine-3'-phosphate
  modified_base 11: mod_base = OTHER; note = guanosine-3'-phosphate
  modified_base 12: mod_base = OTHER; note = 2'-O-methylcytidine-3'-phosphate
  modified_base 13: mod_base = OTHER; note = 2'-O-methyluridine-3'-phosphate
  modified_base 14: mod_base = OTHER; note = 2'-O-methylcytidine-3'-phosphate
  modified_base 15: mod_base = OTHER; note = 2'-O-methyluridine-3'-phosphate
  modified_base 16: mod_base = OTHER; note = adenosine-3'-phosphate
  modified_base 17: mod_base = OTHER; note = 2'-O-methyluridine-3'-phosphate
  modified_base 18: mod_base = OTHER; note = adenosine-3'-phosphate
  modified_base 19: mod_base = OTHER; note = adenosine-3'-phosphate
  misc_feature 1..19: note = RNA
  misc_feature 20..21: note = DNA
cagtgttcttgctctataatt

SEQ ID NO: 281 - RNA, 21 nt, synthetic construct
  source 1..21: mol_type = other RNA
  modified_base 1: mod_base = OTHER; note = 2'-deoxy-2'-fluoroadenosine-3'-phosphate
  modified_base 2: mod_base = OTHER; note = 2'-O-methyladenosine-3'-phosphate
  modified_base 3: mod_base = OTHER; note = 2'-deoxy-2'-fluorocytidine-3'-phosphate
  modified_base 4: mod_base = OTHER; note = 2'-O-methyladenosine-3'-phosphate
  modified_base 5: mod_base = OTHER; note = 2'-deoxy-2'-fluoroguanosine-3'-phosphate
  modified_base 6: mod_base = OTHER; note = 2'-O-methyluridine-3'-phosphate
  modified_base 7: mod_base = OTHER; note = 2'-deoxy-2'-fluoroguanosine-3'-phosphate
  modified_base 8: mod_base = OTHER; note = 2'-O-methyluridine-3'-phosphate
  modified_base 9: mod_base = OTHER; note = 2'-deoxy-2'-fluorouridine-3'-phosphate
  modified_base 10: mod_base = OTHER; note = 2'-deoxy-2'-fluorocytidine-3'-phosphate
  modified_base 11: mod_base = OTHER; note = 2'-deoxy-2'-fluorouridine-3'-phosphate
  modified_base 12: mod_base = OTHER; note = 2'-O-methyluridine-3'-phosphate
  modified_base 13: mod_base = OTHER; note = 2'-deoxy-2'-fluoroguanosine-3'-phosphate
  modified_base 14: mod_base = OTHER; note = 2'-O-methylcytidine-3'-phosphate
  modified_base 15: mod_base = OTHER; note = 2'-deoxy-2'-fluorouridine-3'-phosphate
  modified_base 16: mod_base = OTHER; note = 2'-O-methylcytidine-3'-phosphate
  modified_base 17: mod_base = OTHER; note = 2'-deoxy-2'-fluorouridine-3'-phosphate
  modified_base 18: mod_base = OTHER; note = 2'-O-methyladenosine-3'-phosphate
  modified_base 19: mod_base = OTHER; note = 2'-O-methyluridine-3'-phosphate
  modified_base 20: mod_base = OTHER; note = 2'-O-methyladenosine-3'-phosphorothioate
  modified_base 21: mod_base = OTHER; note = 2'-deoxy-2'-fluoroadenosine
aacagtgttcttgctctataa

SEQ ID NO: 282 - RNA, 21 nt, synthetic construct
  source 1..21: mol_type = other RNA
  modified_base 1: mod_base = OTHER; note = 2'-deoxy-2'-fluoroadenosine-3'-phosphate
  modified_base 2: mod_base = OTHER; note = 2'-O-methyladenosine-3'-phosphate
  modified_base 3: mod_base = OTHER; note = 2'-deoxy-2'-fluorocytidine-3'-phosphate
  modified_base 4: mod_base = OTHER; note = 2'-O-methyladenosine-3'-phosphate
  modified_base 5: mod_base = OTHER; note = 2'-O-methylguanosine-3'-phosphate
  modified_base 6: mod_base = OTHER; note = 2'-O-methyluridine-3'-phosphate
  modified_base 7: mod_base = OTHER; note = 2'-deoxy-2'-fluoroguanosine-3'-phosphate
  modified_base 8: mod_base = OTHER; note = 2'-O-methyluridine-3'-phosphate
  modified_base 9: mod_base = OTHER; note = 2'-deoxy-2'-fluorouridine-3'-phosphate
  modified_base 10: mod_base = OTHER; note = 2'-O-methylcytidine-3'-phosphate
  modified_base 11: mod_base = OTHER; note = 2'-deoxy-2'-fluorouridine-3'-phosphate
  modified_base 12: mod_base = OTHER; note = 2'-O-methyluridine-3'-phosphate
  modified_base 13: mod_base = OTHER; note = 2'-deoxy-2'-fluoroguanosine-3'-phosphate
  modified_base 14: mod_base = OTHER; note = 2'-O-methylcytidine-3'-phosphate
  modified_base 15: mod_base = OTHER; note = 2'-deoxy-2'-fluorouridine-3'-phosphate
  modified_base 16: mod_base = OTHER; note = 2'-deoxy-2'-fluorocytidine-3'-phosphate
  modified_base 17: mod_base = OTHER; note = 2'-deoxy-2'-fluorouridine-3'-phosphate
  modified_base 18: mod_base = OTHER; note = 2'-O-methyladenosine-3'-phosphate
  modified_base 19: mod_base = OTHER; note = 2'-deoxy-2'-fluorouridine-3'-phosphate
  modified_base 20: mod_base = OTHER; note = 2'-O-methyladenosine-3'-phosphorothioate
  modified_base 21: mod_base = OTHER; note = 2'-deoxy-2'-fluoroadenosine
aacagtgttcttgctctataa

SEQ ID NO: 283 - RNA, 21 nt, synthetic construct
  source 1..21: mol_type = other RNA
  modified_base 1: mod_base = OTHER; note = 2'-deoxy-2'-fluoroadenosine-3'-phosphate
  modified_base 2: mod_base = OTHER; note = 2'-O-methyladenosine-3'-phosphate
  modified_base 3: mod_base = OTHER; note = 2'-deoxy-2'-fluorocytidine-3'-phosphate
  modified_base 4: mod_base = OTHER; note = 2'-O-methyladenosine-3'-phosphate
  modified_base 5: mod_base = OTHER; note = 2'-deoxy-2'-fluoroguanosine-3'-phosphate
  modified_base 6: mod_base = OTHER; note = 2'-O-methyluridine-3'-phosphate
  modified_base 7: mod_base = OTHER; note = 2'-deoxy-2'-fluoroguanosine-3'-phosphate
  modified_base 8: mod_base = OTHER; note = 2'-O-methyluridine-3'-phosphate
  modified_base 9: mod_base = OTHER; note = 2'-deoxy-2'-fluorouridine-3'-phosphate
  modified_base 10: mod_base = OTHER; note = 2'-deoxy-2'-fluorocytidine-3'-phosphate
  modified_base 11: mod_base = OTHER; note = 2'-deoxy-2'-fluorouridine-3'-phosphate
  modified_base 12: mod_base = OTHER; note = 2'-O-methyluridine-3'-phosphate
  modified_base 13: mod_base = OTHER; note = 2'-O-methylguanosine-3'-phosphate
  modified_base 14: mod_base = OTHER; note = 2'-O-methylcytidine-3'-phosphate
  modified_base 15: mod_base = OTHER; note = 2'-deoxy-2'-fluorouridine-3'-phosphate
  modified_base 16: mod_base = OTHER; note = 2'-O-methylcytidine-3'-phosphate
  modified_base 17: mod_base = OTHER; note = 2'-deoxy-2'-fluorouridine-3'-phosphate
  modified_base 18: mod_base = OTHER; note = 2'-O-methyladenosine-3'-phosphate
  modified_base 19: mod_base = OTHER; note = 2'-deoxy-2'-fluorouridine-3'-phosphate
  modified_base 20: mod_base = OTHER; note = 2'-O-methyladenosine-3'-phosphorothioate
  modified_base 21: mod_base = OTHER; note = 2'-deoxy-2'-fluoroadenosine
aacagtgttcttgctctataa

SEQ ID NO: 284 - DNA, 21 bp, synthetic construct
  source 1..21: mol_type = other DNA
  modified_base 1: mod_base = OTHER; note = 2'-O-methylcytidine-3'-phosphate
  modified_base 2: mod_base = OTHER; note = adenosine-3'-phosphate
  modified_base 3: mod_base = OTHER; note = guanosine-3'-phosphate
  modified_base 4: mod_base = OTHER; note = 2'-O-methyluridine-3'-phosphate
  modified_base 5: mod_base = OTHER; note = guanosine-3'-phosphate
  modified_base 6: mod_base = OTHER; note = 2'-O-methyluridine-3'-phosphate
  modified_base 7: mod_base = OTHER; note = 2'-O-methyluridine-3'-phosphate
  modified_base 8: mod_base = OTHER; note = 2'-O-methylcytidine-3'-phosphate
  modified_base 9: mod_base = OTHER; note = 2'-O-methyluridine-3'-phosphate
  modified_base 10: mod_base = OTHER; note = 2'-O-methyluridine-3'-phosphate
  modified_base 11: mod_base = OTHER; note = guanosine-3'-phosphate
  modified_base 12: mod_base = OTHER; note = 2'-O-methylcytidine-3'-phosphate
  modified_base 13: mod_base = OTHER; note = 2'-O-methyluridine-3'-phosphate
  modified_base 14: mod_base = OTHER; note = 2'-O-methylcytidine-3'-phosphate
  modified_base 15: mod_base = OTHER; note = 2'-O-methyluridine-3'-phosphate
  modified_base 16: mod_base = OTHER; note = adenosine-3'-phosphate
  modified_base 17: mod_base = OTHER; note = 2'-O-methyluridine-3'-phosphate
  modified_base 18: mod_base = OTHER; note = adenosine-3'-phosphate
  modified_base 19: mod_base = OTHER; note = adenosine-3'-phosphate
  misc_feature 1..19: note = RNA
  misc_feature 20..21: note = DNA
cagtgttcttgctctataatt

SEQ ID NO: 285 - RNA, 21 nt, synthetic construct
  source 1..21: mol_type = other RNA
  modified_base 1: mod_base = OTHER; note = 2'-deoxy-2'-fluoroadenosine-3'-phosphate
  modified_base 2: mod_base = OTHER; note = 2'-O-methyladenosine-3'-phosphate
  modified_base 3: mod_base = OTHER; note = 2'-deoxy-2'-fluorocytidine-3'-phosphate
  modified_base 4: mod_base = OTHER; note = 2'-O-methyladenosine-3'-phosphate
  modified_base 5: mod_base = OTHER; note = 2'-deoxy-2'-fluoroguanosine-3'-phosphate
  modified_base 6: mod_base = OTHER; note = 2'-O-methyluridine-3'-phosphate
  modified_base 7: mod_base = OTHER; note = 2'-deoxy-2'-fluoroguanosine-3'-phosphate
  modified_base 8: mod_base = OTHER; note = 2'-O-methyluridine-3'-phosphate
  modified_base 9: mod_base = OTHER; note = 2'-deoxy-2'-fluorouridine-3'-phosphate
  modified_base 10: mod_base = OTHER; note = 2'-O-methylcytidine-3'-phosphate
  modified_base 11: mod_base = OTHER; note = 2'-deoxy-2'-fluorouridine-3'-phosphate
  modified_base 12: mod_base = OTHER; note = 2'-O-methyluridine-3'-phosphate
  modified_base 13: mod_base = OTHER; note = 2'-deoxy-2'-fluoroguanosine-3'-phosphate
  modified_base 14: mod_base = OTHER; note = 2'-O-methylcytidine-3'-phosphate
  modified_base 15: mod_base = OTHER; note = 2'-deoxy-2'-fluorouridine-3'-phosphate
  modified_base 16: mod_base = OTHER; note = 2'-O-methylcytidine-3'-phosphate
  modified_base 17: mod_base = OTHER; note = 2'-deoxy-2'-fluorouridine-3'-phosphate
  modified_base 18: mod_base = OTHER; note = 2'-O-methyladenosine-3'-phosphate
  modified_base 19: mod_base = OTHER; note = 2'-deoxy-2'-fluorouridine-3'-phosphate
  modified_base 20: mod_base = OTHER; note = 2'-O-methyladenosine-3'-phosphorothioate
  modified_base 21: mod_base = OTHER; note = 2'-O-methyladenosine
aacagtgttcttgctctataa

SEQ ID NO: 286 - RNA, 21 nt, synthetic construct
  source 1..21: mol_type = other RNA
  modified_base 1: mod_base = OTHER; note = 2'-deoxy-2'-fluoroadenosine-3'-phosphate
  modified_base 2: mod_base = OTHER; note = 2'-O-methyladenosine-3'-phosphate
  modified_base 3: mod_base = OTHER; note = 2'-deoxy-2'-fluorocytidine-3'-phosphate
  modified_base 4: mod_base = OTHER; note = 2'-deoxy-2'-fluoroadenosine-3'-phosphate
  modified_base 5: mod_base = OTHER; note = 2'-deoxy-2'-fluoroguanosine-3'-phosphate
  modified_base 6: mod_base = OTHER; note = 2'-O-methyluridine-3'-phosphate
  modified_base 7: mod_base = OTHER; note = 2'-deoxy-2'-fluoroguanosine-3'-phosphate
  modified_base 8: mod_base = OTHER; note = 2'-O-methyluridine-3'-phosphate
  modified_base 9: mod_base = OTHER; note = 2'-deoxy-2'-fluorouridine-3'-phosphate
  modified_base 10: mod_base = OTHER; note = 2'-O-methylcytidine-3'-phosphate
  modified_base 11: mod_base = OTHER; note = 2'-deoxy-2'-fluorouridine-3'-phosphate
  modified_base 12: mod_base = OTHER; note = 2'-O-methyluridine-3'-phosphate
  modified_base 13: mod_base = OTHER; note = 2'-deoxy-2'-fluoroguanosine-3'-phosphate
  modified_base 14: mod_base = OTHER; note = 2'-O-methylcytidine-3'-phosphate
  modified_base 15: mod_base = OTHER; note = 2'-deoxy-2'-fluorouridine-3'-phosphate
  modified_base 16: mod_base = OTHER; note = 2'-O-methylcytidine-3'-phosphate
  modified_base 17: mod_base = OTHER; note = 2'-deoxy-2'-fluorouridine-3'-phosphate
  modified_base 18: mod_base = OTHER; note = 2'-O-methyladenosine-3'-phosphate
  modified_base 19: mod_base = OTHER; note = 2'-deoxy-2'-fluorouridine-3'-phosphate
  modified_base 20: mod_base = OTHER; note = 2'-O-methyladenosine-3'-phosphorothioate
  modified_base 21: mod_base = OTHER; note = 2'-O-methyladenosine
aacagtgttcttgctctataa

SEQ ID NO: 287 - RNA, 21 nt, synthetic construct
  source 1..21: mol_type = other RNA
  modified_base 1: mod_base = OTHER; note = 2'-deoxy-2'-fluoroadenosine-3'-phosphate
  modified_base 2: mod_base = OTHER; note = 2'-O-methyladenosine-3'-phosphate
  modified_base 3: mod_base = OTHER; note = 2'-deoxy-2'-fluorocytidine-3'-phosphate
  modified_base 4: mod_base = OTHER; note = 2'-O-methyladenosine-3'-phosphate
  modified_base 5: mod_base = OTHER; note = 2'-deoxy-2'-fluoroguanosine-3'-phosphate
  modified_base 6: mod_base = OTHER; note = 2'-O-methyluridine-3'-phosphate
  modified_base 7: mod_base = OTHER; note = 2'-deoxy-2'-fluoroguanosine-3'-phosphate
  modified_base 8: mod_base = OTHER; note = 2'-O-methyluridine-3'-phosphate
  modified_base 9: mod_base = OTHER; note = 2'-deoxy-2'-fluorouridine-3'-phosphate
  modified_base 10: mod_base = OTHER; note = 2'-O-methylcytidine-3'-phosphate
  modified_base 11: mod_base = OTHER; note = 2'-deoxy-2'-fluorouridine-3'-phosphate
  modified_base 12: mod_base = OTHER; note = 2'-O-methyluridine-3'-phosphate
  modified_base 13: mod_base = OTHER; note = 2'-deoxy-2'-fluoroguanosine-3'-phosphate
  modified_base 14: mod_base = OTHER; note = 2'-O-methylcytidine-3'-phosphate
  modified_base 15: mod_base = OTHER; note = 2'-deoxy-2'-fluorouridine-3'-phosphate
  modified_base 16: mod_base = OTHER; note = 2'-O-methylcytidine-3'-phosphate
  modified_base 17: mod_base = OTHER; note = 2'-deoxy-2'-fluorouridine-3'-phosphate
  modified_base 18: mod_base = OTHER; note = 2'-O-methyladenosine-3'-phosphate
  modified_base 19: mod_base = OTHER; note = 2'-deoxy-2'-fluorouridine-3'-phosphate
  modified_base 20: mod_base = OTHER; note = 2'-O-methyladenosine-3'-phosphorothioate
  modified_base 21: mod_base = OTHER; note = 2'-deoxy-2'-fluoroadenosine
aacagtgttcttgctctataa

SEQ ID NO: 288 - RNA, 21 nt, synthetic construct
  source 1..21: mol_type = other RNA
  modified_base 1: mod_base = OTHER; note = 2'-deoxy-2'-fluoroadenosine-3'-phosphate
  modified_base 2: mod_base = OTHER; note = 2'-O-methyladenosine-3'-phosphate
  modified_base 3: mod_base = OTHER; note = 2'-deoxy-2'-fluorocytidine-3'-phosphate
  modified_base 4: mod_base = OTHER; note = 2'-O-methyladenosine-3'-phosphate
  modified_base 5: mod_base = OTHER; note = 2'-deoxy-2'-fluoroguanosine-3'-phosphate
  modified_base 6: mod_base = OTHER; note = 2'-O-methyluridine-3'-phosphate
  modified_base 7: mod_base = OTHER; note = 2'-deoxy-2'-fluoroguanosine-3'-phosphate
  modified_base 8: mod_base = OTHER; note = 2'-O-methyluridine-3'-phosphate
  modified_base 9: mod_base = OTHER; note = 2'-deoxy-2'-fluorouridine-3'-phosphate
  modified_base 10: mod_base = OTHER; note = 2'-O-methylcytidine-3'-phosphate
  modified_base 11: mod_base = OTHER; note = 2'-deoxy-2'-fluorouridine-3'-phosphate
  modified_base 12: mod_base = OTHER; note = 2'-O-methyluridine-3'-phosphate
  modified_base 13: mod_base = OTHER; note = 2'-deoxy-2'-fluoroguanosine-3'-phosphate
  modified_base 14: mod_base = OTHER; note = 2'-O-methylcytidine-3'-phosphate
  modified_base 15: mod_base = OTHER; note = 2'-O-methyluridine-3'-phosphate
  modified_base 16: mod_base = OTHER; note = 2'-O-methylcytidine-3'-phosphate
  modified_base 17: mod_base = OTHER; note = 2'-deoxy-2'-fluorouridine-3'-phosphate
  modified_base 18: mod_base = OTHER; note = 2'-O-methyladenosine-3'-phosphate
  modified_base 19: mod_base = OTHER; note = 2'-deoxy-2'-fluorouridine-3'-phosphate
  modified_base 20: mod_base = OTHER; note = 2'-O-methyladenosine-3'-phosphorothioate
  modified_base 21: mod_base = OTHER; note = 2'-deoxy-2'-fluoroadenosine
aacagtgttcttgctctataa

SEQ ID NO: 289 - RNA, 21 nt, synthetic construct
  source 1..21: mol_type = other RNA
  modified_base 1: mod_base = OTHER; note = 2'-deoxy-2'-fluoroadenosine-3'-phosphate
  modified_base 2: mod_base = OTHER; note = 2'-O-methyladenosine-3'-phosphate
  modified_base 3: mod_base = OTHER; note = 2'-O-methylcytidine-3'-phosphate
  modified_base 4: mod_base = OTHER; note = 2'-O-methyladenosine-3'-phosphate
  modified_base 5: mod_base = OTHER; note = 2'-deoxy-2'-fluoroguanosine-3'-phosphate
  modified_base 6: mod_base = OTHER; note = 2'-O-methyluridine-3'-phosphate
  modified_base 7: mod_base = OTHER; note = 2'-deoxy-2'-fluoroguanosine-3'-phosphate
  modified_base 8: mod_base = OTHER; note = 2'-O-methyluridine-3'-phosphate
  modified_base 9: mod_base = OTHER; note = 2'-deoxy-2'-fluorouridine-3'-phosphate
  modified_base 10: mod_base = OTHER; note = 2'-O-methylcytidine-3'-phosphate
  modified_base 11: mod_base = OTHER; note = 2'-deoxy-2'-fluorouridine-3'-phosphate
  modified_base 12: mod_base = OTHER; note = 2'-O-methyluridine-3'-phosphate
  modified_base 13: mod_base = OTHER; note = 2'-deoxy-2'-fluoroguanosine-3'-phosphate
  modified_base 14: mod_base = OTHER; note = 2'-O-methylcytidine-3'-phosphate
  modified_base 15: mod_base = OTHER; note = 2'-deoxy-2'-fluorouridine-3'-phosphate
  modified_base 16: mod_base = OTHER; note = 2'-O-methylcytidine-3'-phosphate
  modified_base 17: mod_base = OTHER; note = 2'-deoxy-2'-fluorouridine-3'-phosphate
  modified_base 18: mod_base = OTHER; note = 2'-O-methyladenosine-3'-phosphate
  modified_base 19: mod_base = OTHER; note = 2'-deoxy-2'-fluorouridine-3'-phosphate
  modified_base 20: mod_base = OTHER; note = 2'-O-methyladenosine-3'-phosphorothioate
  modified_base 21: mod_base = OTHER; note = 2'-deoxy-2'-fluoroadenosine
aacagtgttcttgctctataa

SEQ ID NO: 290 - RNA, 21 nt, synthetic construct
  source 1..21: mol_type = other RNA
  modified_base 1: mod_base = OTHER; note = 2'-deoxy-2'-fluoroadenosine-3'-phosphate
  modified_base 2: mod_base = OTHER; note = 2'-deoxy-2'-fluoroadenosine-3'-phosphate
  modified_base 3: mod_base = OTHER; note = 2'-deoxy-2'-fluorocytidine-3'-phosphate
  modified_base 4: mod_base = OTHER; note = 2'-O-methyladenosine-3'-phosphate
  modified_base 5: mod_base = OTHER; note = 2'-deoxy-2'-fluoroguanosine-3'-phosphate
  modified_base 6: mod_base = OTHER; note = 2'-O-methyluridine-3'-phosphate
  modified_base 7: mod_base = OTHER; note = 2'-deoxy-2'-fluoroguanosine-3'-phosphate
  modified_base 8: mod_base = OTHER; note = 2'-O-methyluridine-3'-phosphate
  modified_base 9: mod_base = OTHER; note = 2'-deoxy-2'-fluorouridine-3'-phosphate
  modified_base 10: mod_base = OTHER; note = 2'-O-methylcytidine-3'-phosphate
  modified_base 11: mod_base = OTHER; note = 2'-deoxy-2'-fluorouridine-3'-phosphate
  modified_base 12: mod_base = OTHER; note = 2'-O-methyluridine-3'-phosphate
  modified_base 13: mod_base = OTHER; note = 2'-deoxy-2'-fluoroguanosine-3'-phosphate
  modified_base 14: mod_base = OTHER; note = 2'-O-methylcytidine-3'-phosphate
  modified_base 15: mod_base = OTHER; note = 2'-O-methyluridine-3'-phosphate
  modified_base 16: mod_base = OTHER; note = 2'-O-methylcytidine-3'-phosphate
  modified_base 17: mod_base = OTHER; note = 2'-deoxy-2'-fluorouridine-3'-phosphate
  modified_base 18: mod_base = OTHER; note = 2'-O-methyladenosine-3'-phosphate
  modified_base 19: mod_base = OTHER; note = 2'-deoxy-2'-fluorouridine-3'-phosphate
  modified_base 20: mod_base = OTHER; note = 2'-O-methyladenosine-3'-phosphorothioate
  modified_base 21: mod_base = OTHER; note = 2'-deoxy-2'-fluoroadenosine
aacagtgttcttgctctataa

SEQ ID NO: 291 - RNA, 21 nt, synthetic construct
  source 1..21: mol_type = other RNA
  modified_base 1: mod_base = OTHER; note = 2'-deoxy-2'-fluoroadenosine-3'-phosphate
  modified_base 2: mod_base = OTHER; note = 2'-O-methyladenosine-3'-phosphate
  modified_base 3: mod_base = OTHER; note = 2'-deoxy-2'-fluorocytidine-3'-phosphate
  modified_base 4: mod_base = OTHER; note = 2'-deoxy-2'-fluoroadenosine-3'-phosphate
  modified_base 5: mod_base = OTHER; note = 2'-deoxy-2'-fluoroguanosine-3'-phosphate
  modified_base 6: mod_base = OTHER; note = 2'-O-methyluridine-3'-phosphate
  modified_base 7: mod_base = OTHER; note = 2'-deoxy-2'-fluoroguanosine-3'-phosphate
  modified_base 8: mod_base = OTHER; note = 2'-O-methyluridine-3'-phosphate
  modified_base 9: mod_base = OTHER; note = 2'-deoxy-2'-fluorouridine-3'-phosphate
  modified_base 10: mod_base = OTHER; note = 2'-O-methylcytidine-3'-phosphate
  modified_base 11: mod_base = OTHER; note = 2'-deoxy-2'-fluorouridine-3'-phosphate
  modified_base 12: mod_base = OTHER; note = 2'-O-methyluridine-3'-phosphate
  modified_base 13: mod_base = OTHER; note = 2'-deoxy-2'-fluoroguanosine-3'-phosphate
  modified_base 14: mod_base = OTHER; note = 2'-O-methylcytidine-3'-phosphate
  modified_base 15: mod_base = OTHER; note = 2'-deoxy-2'-fluorouridine-3'-phosphate
  modified_base 16: mod_base = OTHER; note = 2'-O-methylcytidine-3'-phosphate
  modified_base 17: mod_base = OTHER; note = 2'-deoxy-2'-fluorouridine-3'-phosphate
  modified_base 18: mod_base = OTHER; note = 2'-O-methyladenosine-3'-phosphate
  modified_base 19: mod_base = OTHER; note = 2'-O-methyluridine-3'-phosphate
  modified_base 20: mod_base = OTHER; note = 2'-O-methyladenosine-3'-phosphorothioate
  modified_base 21: mod_base = OTHER; note = 2'-deoxy-2'-fluoroadenosine
aacagtgttcttgctctataa

SEQ ID NO: 292 - RNA, 21 nt, synthetic construct
  source 1..21: mol_type = other RNA
  modified_base 1: mod_base = OTHER; note = 2'-deoxy-2'-fluoroadenosine-3'-phosphate
  modified_base 2: mod_base = OTHER; note = 2'-O-methyladenosine-3'-phosphate
  modified_base 3: mod_base = OTHER; note = 2'-deoxy-2'-fluorocytidine-3'-phosphate
  modified_base 4: mod_base = OTHER; note = 2'-O-methyladenosine-3'-phosphate
  modified_base 5: mod_base = OTHER; note = 2'-deoxy-2'-fluoroguanosine-3'-phosphate
  modified_base 6: mod_base = OTHER; note = 2'-O-methyluridine-3'-phosphate
  modified_base 7: mod_base = OTHER; note = 2'-deoxy-2'-fluoroguanosine-3'-phosphate
  modified_base 8: mod_base = OTHER; note = 2'-O-methyluridine-3'-phosphate
  modified_base 9: mod_base = OTHER; note = 2'-deoxy-2'-fluorouridine-3'-phosphate
  modified_base 10: mod_base = OTHER; note = 2'-O-methylcytidine-3'-phosphate
  modified_base 11: mod_base = OTHER; note = 2'-deoxy-2'-fluorouridine-3'-phosphate
  modified_base 12: mod_base = OTHER; note = 2'-O-methyluridine-3'-phosphate
  modified_base 13: mod_base = OTHER; note = 2'-O-methylguanosine-3'-phosphate
  modified_base 14: mod_base = OTHER; note = 2'-O-methylcytidine-3'-phosphate
  modified_base 15: mod_base = OTHER; note = 2'-deoxy-2'-fluorouridine-3'-phosphate
  modified_base 16: mod_base = OTHER; note = 2'-O-methylcytidine-3'-phosphate
  modified_base 17: mod_base = OTHER; note = 2'-deoxy-2'-fluorouridine-3'-phosphate
  modified_base 18: mod_base = OTHER; note = 2'-O-methyladenosine-3'-phosphate
  modified_base 19: mod_base = OTHER; note = 2'-deoxy-2'-fluorouridine-3'-phosphate
  modified_base 20: mod_base = OTHER; note = 2'-O-methyladenosine-3'-phosphorothioate
  modified_base 21: mod_base = OTHER; note = 2'-deoxy-2'-fluoroadenosine
aacagtgttcttgctctataa

SEQ ID NO: 293 - RNA, 21 nt, synthetic construct
  source 1..21: mol_type = other RNA
  modified_base 1: mod_base = OTHER; note = 2'-deoxy-2'-fluoroadenosine-3'-phosphate
  modified_base 2: mod_base = OTHER; note = 2'-O-methyladenosine-3'-phosphate
  modified_base 3: mod_base = OTHER; note = 2'-deoxy-2'-fluorocytidine-3'-phosphate
  modified_base 4: mod_base = OTHER; note = 2'-O-methyladenosine-3'-phosphate
  modified_base 5: mod_base = OTHER; note = 2'-deoxy-2'-fluoroguanosine-3'-phosphate
  modified_base 6: mod_base = OTHER; note = 2'-O-methyluridine-3'-phosphate
  modified_base 7: mod_base = OTHER; note = 2'-deoxy-2'-fluoroguanosine-3'-phosphate
  modified_base 8: mod_base = OTHER; note = 2'-O-methyluridine-3'-phosphate
  modified_base 9: mod_base = OTHER; note = 2'-deoxy-2'-fluorouridine-3'-phosphate
  modified_base 10: mod_base = OTHER; note = 2'-O-methylcytidine-3'-phosphate
  modified_base 11: mod_base = OTHER; note = 2'-deoxy-2'-fluorouridine-3'-phosphate
  modified_base 12: mod_base = OTHER; note = 2'-O-methyluridine-3'-phosphate
  modified_base 13: mod_base = OTHER; note = 2'-O-methylguanosine-3'-phosphate
  modified_base 14: mod_base = OTHER; note = 2'-O-methylcytidine-3'-phosphate
  modified_base 15: mod_base = OTHER; note = 2'-deoxy-2'-fluorouridine-3'-phosphate
  modified_base 16: mod_base = OTHER; note = 2'-O-methylcytidine-3'-phosphate
  modified_base 17: mod_base = OTHER; note = 2'-deoxy-2'-fluorouridine-3'-phosphate
  modified_base 18: mod_base = OTHER; note = 2'-O-methyladenosine-3'-phosphate
  modified_base 19: mod_base = OTHER; note = 2'-deoxy-2'-fluorouridine-3'-phosphate
  modified_base 20: mod_base = OTHER; note = 2'-O-methyladenosine-3'-phosphorothioate
  modified_base 21: mod_base = OTHER; note = 2'-deoxy-2'-fluoroadenosine
aacagtgttcttgctctataa

SEQ ID NO: 294 - RNA, 21 nt, synthetic construct
  source 1..21: mol_type = other RNA
  modified_base 1: mod_base = OTHER; note = 2'-deoxy-2'-fluoroadenosine-3'-phosphate
  modified_base 2: mod_base = OTHER; note = 2'-O-methyladenosine-3'-phosphate
  modified_base 3: mod_base = OTHER; note = 2'-deoxy-2'-fluorocytidine-3'-phosphate
  modified_base 4: mod_base = OTHER; note = 2'-O-methyladenosine-3'-phosphate
  modified_base 5: mod_base = OTHER; note = 2'-deoxy-2'-fluoroguanosine-3'-phosphate
  modified_base 6: mod_base = OTHER; note = 2'-O-methyluridine-3'-phosphate
  modified_base 7: mod_base = OTHER; note = 2'-deoxy-2'-fluoroguanosine-3'-phosphate
  modified_base 8: mod_base = OTHER; note = 2'-O-methyluridine-3'-phosphate
  modified_base 9: mod_base = OTHER; note = 2'-deoxy-2'-fluorouridine-3'-phosphate
  modified_base 10: mod_base = OTHER; note = 2'-O-methylcytidine-3'-phosphate
  modified_base 11: mod_base = OTHER; note = 2'-deoxy-2'-fluorouridine-3'-phosphate
  modified_base 12: mod_base = OTHER; note = 2'-deoxy-2'-fluorouridine-3'-phosphate
  modified_base 13: mod_base = OTHER; note = 2'-deoxy-2'-fluoroguanosine-3'-phosphate
  modified_base 14: mod_base = OTHER; note = 2'-O-methylcytidine-3'-phosphate
  modified_base 15: mod_base = OTHER; note = 2'-O-methyluridine-3'-phosphate
  modified_base 16: mod_base = OTHER; note = 2'-O-methylcytidine-3'-phosphate
  modified_base 17: mod_base = OTHER; note = 2'-deoxy-2'-fluorouridine-3'-phosphate
  modified_base 18: mod_base = OTHER; note = 2'-O-methyladenosine-3'-phosphate
  modified_base 19: mod_base = OTHER; note = 2'-deoxy-2'-fluorouridine-3'-phosphate
  modified_base 20: mod_base = OTHER; note = 2'-O-methyladenosine-3'-phosphorothioate
  modified_base 21: mod_base = OTHER; note = 2'-deoxy-2'-fluoroadenosine
aacagtgttcttgctctataa

SEQ ID NO: 295 - RNA, 21 nt, synthetic construct
  source 1..21: mol_type = other RNA
  modified_base 1: mod_base = OTHER; note = 2'-deoxy-2'-fluoroadenosine-3'-phosphate
  modified_base 2: mod_base = OTHER; note = 2'-deoxy-2'-fluoroadenosine-3'-phosphate
  modified_base 3: mod_base = OTHER; note = 2'-deoxy-2'-fluorocytidine-3'-phosphate
  modified_base 4: mod_base = OTHER; note = 2'-O-methyladenosine-3'-phosphate
  modified_base 5: mod_base = OTHER; note = 2'-deoxy-2'-fluoroguanosine-3'-phosphate
  modified_base 6: mod_base = OTHER; note = 2'-O-methyluridine-3'-phosphate
  modified_base 7: mod_base = OTHER; note = 2'-deoxy-2'-fluoroguanosine-3'-phosphate
  modified_base 8: mod_base = OTHER; note = 2'-O-methyluridine-3'-phosphate
  modified_base 9: mod_base = OTHER; note = 2'-deoxy-2'-fluorouridine-3'-phosphate
  modified_base 10: mod_base = OTHER; note = 2'-O-methylcytidine-3'-phosphate
  modified_base 11: mod_base = OTHER; note = 2'-deoxy-2'-fluorouridine-3'-phosphate
  modified_base 12: mod_base = OTHER; note = 2'-O-methyluridine-3'-phosphate
  modified_base 13: mod_base = OTHER; note = 2'-deoxy-2'-fluoroguanosine-3'-phosphate
  modified_base 14: mod_base = OTHER; note = 2'-O-methylcytidine-3'-phosphate
  modified_base 15: mod_base = OTHER; note = 2'-deoxy-2'-fluorouridine-3'-phosphate
  modified_base 16: mod_base = OTHER; note = 2'-O-methylcytidine-3'-phosphate
  modified_base 17: mod_base = OTHER; note = 2'-deoxy-2'-fluorouridine-3'-phosphate
  modified_base 18: mod_base = OTHER; note = 2'-O-methyladenosine-3'-phosphate
  modified_base 19: mod_base = OTHER; note = 2'-deoxy-2'-fluorouridine-3'-phosphate
  modified_base 20: mod_base = OTHER; note = 2'-O-methyladenosine-3'-phosphorothioate
  modified_base 21: mod_base = OTHER; note = 2'-O-methyladenosine
aacagtgttcttgctctataa

SEQ ID NO: 296 - RNA, 21 nt, synthetic construct
  source 1..21: mol_type = other RNA
  modified_base 1: mod_base = OTHER; note = 2'-deoxy-2'-fluoroadenosine-3'-phosphate
  modified_base 2: mod_base = OTHER; note = 2'-O-methyladenosine-3'-phosphate
  modified_base 3: mod_base = OTHER; note = 2'-deoxy-2'-fluorocytidine-3'-phosphate
  modified_base 4: mod_base = OTHER; note = 2'-O-methyladenosine-3'-phosphate
  modified_base 5: mod_base = OTHER; note = 2'-deoxy-2'-fluoroguanosine-3'-phosphate
  modified_base 6: mod_base = OTHER; note = 2'-O-methyluridine-3'-phosphate
  modified_base 7: mod_base = OTHER; note = 2'-deoxy-2'-fluoroguanosine-3'-phosphate
  modified_base 8: mod_base = OTHER; note = 2'-O-methyluridine-3'-phosphate
  modified_base 9: mod_base = OTHER; note = 2'-deoxy-2'-fluorouridine-3'-phosphate
  modified_base 10: mod_base = OTHER; note = 2'-deoxy-2'-fluorocytidine-3'-phosphate
  modified_base 11: mod_base = OTHER; note = 2'-deoxy-2'-fluorouridine-3'-phosphate
  modified_base 12: mod_base = OTHER; note = 2'-O-methyluridine-3'-phosphate
  modified_base 13: mod_base = OTHER; note = 2'-deoxy-2'-fluoroguanosine-3'-phosphate
  modified_base 14: mod_base = OTHER; note = 2'-O-methylcytidine-3'-phosphate
  modified_base 15: mod_base = OTHER; note = 2'-deoxy-2'-fluorouridine-3'-phosphate
  modified_base 16: mod_base = OTHER; note = 2'-O-methylcytidine-3'-phosphate
  modified_base 17: mod_base = OTHER; note = 2'-deoxy-2'-fluorouridine-3'-phosphate
  modified_base 18: mod_base = OTHER; note = 2'-O-methyladenosine-3'-phosphate
  modified_base 19: mod_base = OTHER; note = 2'-deoxy-2'-fluorouridine-3'-phosphate
  modified_base 20: mod_base = OTHER; note = 2'-O-methyladenosine-3'-phosphorothioate
  modified_base 21: mod_base = OTHER; note = 2'-deoxy-2'-fluoroadenosine
aacagtgttcttgctctataa

SEQ ID NO: 297 - RNA, 21 nt, synthetic construct
  source 1..21: mol_type = other RNA
  modified_base 1: mod_base = OTHER; note = 2'-deoxy-2'-fluoroadenosine-3'-phosphate
  modified_base 2: mod_base = OTHER; note = 2'-O-methyladenosine-3'-phosphate
  modified_base 3: mod_base = OTHER; note = 2'-deoxy-2'-fluorocytidine-3'-phosphate
  modified_base 4: mod_base = OTHER; note = 2'-deoxy-2'-fluoroadenosine-3'-phosphate
  modified_base 5: mod_base = OTHER; note = 2'-deoxy-2'-fluoroguanosine-3'-phosphate
  modified_base 6: mod_base = OTHER; note = 2'-O-methyluridine-3'-phosphate
  modified_base 7: mod_base = OTHER; note = 2'-deoxy-2'-fluoroguanosine-3'-phosphate
  modified_base 8: mod_base = OTHER; note = 2'-O-methyluridine-3'-phosphate
  modified_base 9: mod_base = OTHER; note = 2'-deoxy-2'-fluorouridine-3'-phosphate
  modified_base 10: mod_base = OTHER; note = 2'-O-methylcytidine-3'-phosphate
  modified_base 11: mod_base = OTHER; note = 2'-deoxy-2'-fluorouridine-3'-phosphate
  modified_base 12: mod_base = OTHER; note = 2'-O-methyluridine-3'-phosphate
  modified_base 13: mod_base = OTHER; note = 2'-O-methylguanosine-3'-phosphate
  modified_base 14: mod_base = OTHER; note = 2'-O-methylcytidine-3'-phosphate
  modified_base 15: mod_base = OTHER; note = 2'-deoxy-2'-fluorouridine-3'-phosphate
  modified_base 16: mod_base = OTHER; note = 2'-O-methylcytidine-3'-phosphate
  modified_base 17: mod_base = OTHER; note = 2'-deoxy-2'-fluorouridine-3'-phosphate
  modified_base 18: mod_base = OTHER; note = 2'-O-methyladenosine-3'-phosphate
  modified_base 19: mod_base = OTHER; note = 2'-deoxy-2'-fluorouridine-3'-phosphate
  modified_base 20: mod_base = OTHER; note = 2'-O-methyladenosine-3'-phosphorothioate
  modified_base 21: mod_base = OTHER; note = 2'-deoxy-2'-fluoroadenosine
aacagtgttcttgctctataa

SEQ ID NO: 298 - RNA, 21 nt, synthetic construct
  source 1..21: mol_type = other RNA
  modified_base 1: mod_base = OTHER; note = 2'-deoxy-2'-fluoroadenosine-3'-phosphate
  modified_base 2: mod_base = OTHER; note = 2'-O-methyladenosine-3'-phosphate
  modified_base 3: mod_base = OTHER; note = 2'-deoxy-2'-fluorocytidine-3'-phosphate
  modified_base 4: mod_base = OTHER; note = 2'-O-methyladenosine-3'-phosphate
  modified_base 5: mod_base = OTHER; note = 2'-deoxy-2'-fluoroguanosine-3'-phosphate
  modified_base 6: mod_base = OTHER; note = 2'-deoxy-2'-fluorouridine-3'-phosphate
  modified_base 7: mod_base = OTHER; note = 2'-deoxy-2'-fluoroguanosine-3'-phosphate
  modified_base 8: mod_base = OTHER; note = 2'-O-methyluridine-3'-phosphate
  modified_base 9: mod_base = OTHER; note = 2'-deoxy-2'-fluorouridine-3'-phosphate
  modified_base 10: mod_base = OTHER; note = 2'-O-methylcytidine-3'-phosphate
  modified_base 11: mod_base = OTHER; note = 2'-deoxy-2'-fluorouridine-3'-phosphate
  modified_base 12: mod_base = OTHER; note = 2'-O-methyluridine-3'-phosphate
  modified_base 13: mod_base = OTHER; note = 2'-deoxy-2'-fluoroguanosine-3'-phosphate
  modified_base 14: mod_base = OTHER; note = 2'-O-methylcytidine-3'-phosphate
  modified_base 15: mod_base = OTHER; note = 2'-deoxy-2'-fluorouridine-3'-phosphate
  modified_base 16: mod_base = OTHER; note = 2'-O-methylcytidine-3'-phosphate
  modified_base 17: mod_base = OTHER; note = 2'-deoxy-2'-fluorouridine-3'-phosphate
  modified_base 18: mod_base = OTHER; note = 2'-O-methyladenosine-3'-phosphate
  modified_base 19: mod_base = OTHER; note = 2'-deoxy-2'-fluorouridine-3'-phosphate
  modified_base 20: mod_base = OTHER; note = 2'-O-methyladenosine-3'-phosphorothioate
  modified_base 21: mod_base = OTHER; note = 2'-O-methyladenosine
aacagtgttcttgctctataa

SEQ ID NO: 299 - RNA, 21 nt, synthetic construct
  source 1..21: mol_type = other RNA
  modified_base 1: mod_base = OTHER; note = 2'-deoxy-2'-fluoroadenosine-3'-phosphate
  modified_base 2: mod_base = OTHER; note = 2'-O-methyladenosine-3'-phosphate
  modified_base 3: mod_base = OTHER; note = 2'-deoxy-2'-fluorocytidine-3'-phosphate
  modified_base 4: mod_base = OTHER; note = 2'-deoxy-2'-fluoroadenosine-3'-phosphate
  modified_base 5: mod_base = OTHER; note = 2'-deoxy-2'-fluoroguanosine-3'-phosphate
  modified_base 6: mod_base = OTHER; note = 2'-O-methyluridine-3'-phosphate
  modified_base 7: mod_base = OTHER; note = 2'-deoxy-2'-fluoroguanosine-3'-phosphate
  modified_base 8: mod_base = OTHER; note = 2'-O-methyluridine-3'-phosphate
  modified_base 9: mod_base = OTHER; note = 2'-deoxy-2'-fluorouridine-3'-phosphate
  modified_base 10: mod_base = OTHER; note = 2'-O-methylcytidine-3'-phosphate
  modified_base 11: mod_base = OTHER; note = 2'-deoxy-2'-fluorouridine-3'-phosphate
  modified_base 12: mod_base = OTHER; note = 2'-O-methyluridine-3'-phosphate
  modified_base 13: mod_base = OTHER; note = 2'-deoxy-2'-fluoroguanosine-3'-phosphate
  modified_base 14: mod_base = OTHER; note = 2'-O-methylcytidine-3'-phosphate
  modified_base 15: mod_base = OTHER; note = 2'-deoxy-2'-fluorouridine-3'-phosphate
  modified_base 16: mod_base = OTHER; note = 2'-O-methylcytidine-3'-phosphate
  modified_base 17: mod_base = OTHER; note = 2'-O-methyluridine-3'-phosphate
  modified_base 18: mod_base = OTHER; note = 2'-O-methyladenosine-3'-phosphate
  modified_base 19: mod_base = OTHER; note = 2'-deoxy-2'-fluorouridine-3'-phosphate
  modified_base 20: mod_base = OTHER; note = 2'-O-methyladenosine-3'-phosphorothioate
  modified_base 21: mod_base = OTHER; note = 2'-deoxy-2'-fluoroadenosine
aacagtgttcttgctctataa

SEQ ID NO: 300 - RNA, 21 nt, synthetic construct
  source 1..21: mol_type = other RNA
  modified_base 1: mod_base = OTHER; note = 2'-deoxy-2'-fluoroadenosine-3'-phosphate
  modified_base 2: mod_base = OTHER; note = 2'-O-methyladenosine-3'-phosphate
  modified_base 3: mod_base = OTHER; note = 2'-deoxy-2'-fluorocytidine-3'-phosphate
  modified_base 4: mod_base = OTHER; note = 2'-O-methyladenosine-3'-phosphate
  modified_base 5: mod_base = OTHER; note = 2'-deoxy-2'-fluoroguanosine-3'-phosphate
  modified_base 6: mod_base = OTHER; note = 2'-deoxy-2'-fluorouridine-3'-phosphate
  modified_base 7: mod_base = OTHER; note = 2'-deoxy-2'-fluoroguanosine-3'-phosphate
  modified_base 8: mod_base = OTHER; note = 2'-O-methyluridine-3'-phosphate
  modified_base 9: mod_base = OTHER; note = 2'-deoxy-2'-fluorouridine-3'-phosphate
  modified_base 10: mod_base = OTHER; note = 2'-O-methylcytidine-3'-phosphate
  modified_base 11: mod_base = OTHER; note = 2'-deoxy-2'-fluorouridine-3'-phosphate
  modified_base 12: mod_base = OTHER; note = 2'-O-methyluridine-3'-phosphate
  modified_base 13: mod_base = OTHER; note = 2'-deoxy-2'-fluoroguanosine-3'-phosphate
  modified_base 14: mod_base = OTHER; note = 2'-O-methylcytidine-3'-phosphate
  modified_base 15: mod_base = OTHER; note = 2'-deoxy-2'-fluorouridine-3'-phosphate
  modified_base 16: mod_base = OTHER; note = 2'-O-methylcytidine-3'-phosphate
  modified_base 17: mod_base = OTHER; note = 2'-O-methyluridine-3'-phosphate
  modified_base 18: mod_base = OTHER; note = 2'-O-methyladenosine-3'-phosphate
  modified_base 19: mod_base = OTHER; note = 2'-deoxy-2'-fluorouridine-3'-phosphate
  modified_base 20: mod_base = OTHER; note = 2'-O-methyladenosine-3'-phosphorothioate
  modified_base 21: mod_base = OTHER; note = 2'-deoxy-2'-fluoroadenosine
aacagtgttcttgctctataa

SEQ ID NO: 301 - DNA, 21 bp, synthetic construct
  source 1..21: mol_type = other DNA
  modified_base 1: mod_base = OTHER; note = 2'-O-methyladenosine-3'-phosphate
  modified_base 4: mod_base = OTHER; note = 2'-O-methyladenosine-3'-phosphate
  modified_base 5: mod_base = OTHER; note = 2'-O-methylguanosine-3'-phosphate
  modified_base 8: mod_base = OTHER; note = 2'-O-methyluridine-3'-phosphate
  modified_base 9: mod_base = OTHER; note = 2'-O-methyluridine-3'-phosphate
  modified_base 12: mod_base = OTHER; note = 2'-O-methyluridine-3'-phosphate
  modified_base 13: mod_base = OTHER; note = 2'-O-methylguanosine-3'-phosphate
  modified_base 16: mod_base = OTHER; note = 2'-O-methylcytidine-3'-phosphate
  modified_base 17: mod_base = OTHER; note = 2'-O-methyluridine-3'-phosphate
  modified_base 20: mod_base = OTHER; note = 2'-O-methyladenosine-3'-phosphorothioate
  modified_base 21: mod_base = OTHER; note = 2'-O-methyladenosine
  misc_feature 1: note = RNA
  misc_feature 4..5: note = RNA
  misc_feature 8..9: note = RNA
  misc_feature 12..13: note = RNA
  misc_feature 16..17: note = RNA
  misc_feature 20..21: note = RNA
  misc_feature 2..3: note = DNA
  misc_feature 6..7: note = DNA
  misc_feature 10..11: note = DNA
  misc_feature 14..15: note = DNA
  misc_feature 18..19: note = DNA
aacagtgttcttgctctataa

SEQ ID NO: 302 - RNA, 21 nt, synthetic construct
  source 1..21: mol_type = other RNA
  modified_base 1: mod_base = OTHER; note = 2'-deoxy-2'-fluoroadenosine-3'-phosphate
  modified_base 2: mod_base = OTHER; note = 2'-O-methyladenosine-3'-phosphate
  modified_base 3: mod_base = OTHER; note = 2'-O-methylcytidine-3'-phosphate
  modified_base 4: mod_base = OTHER; note = 2'-O-methyladenosine-3'-phosphate
  modified_base 5: mod_base = OTHER; note = 2'-deoxy-2'-fluoroguanosine-3'-phosphate
  modified_base 6: mod_base = OTHER; note = 2'-deoxy-2'-fluorouridine-3'-phosphate
  modified_base 7: mod_base = OTHER; note = 2'-deoxy-2'-fluoroguanosine-3'-phosphate
  modified_base 8: mod_base = OTHER; note = 2'-O-methyluridine-3'-phosphate
  modified_base 9: mod_base = OTHER; note = 2'-deoxy-2'-fluorouridine-3'-phosphate
  modified_base 10: mod_base = OTHER; note = 2'-O-methylcytidine-3'-phosphate
  modified_base 11: mod_base = OTHER; note = 2'-deoxy-2'-fluorouridine-3'-phosphate
  modified_base 12: mod_base = OTHER; note = 2'-O-methyluridine-3'-phosphate
  modified_base 13: mod_base = OTHER; note = 2'-deoxy-2'-fluoroguanosine-3'-phosphate
  modified_base 14: mod_base = OTHER; note = 2'-O-methylcytidine-3'-phosphate
  modified_base 15: mod_base = OTHER; note = 2'-deoxy-2'-fluorouridine-3'-phosphate
  modified_base 16: mod_base = OTHER; note = 2'-O-methylcytidine-3'-phosphate
  modified_base 17: mod_base = OTHER; note = 2'-deoxy-2'-fluorouridine-3'-phosphate
  modified_base 18: mod_base = OTHER; note = 2'-O-methyladenosine-3'-phosphate
  modified_base 19: mod_base = OTHER; note = 2'-deoxy-2'-fluorouridine-3'-phosphate
  modified_base 20: mod_base = OTHER; note = 2'-O-methyladenosine-3'-phosphorothioate
  modified_base 21: mod_base = OTHER; note = 2'-deoxy-2'-fluoroadenosine
aacagtgttcttgctctataa

SEQ ID NO: 303 - RNA, 21 nt, synthetic construct
  source 1..21: mol_type = other RNA
  modified_base 1: mod_base = OTHER; note = 2'-deoxy-2'-fluoroadenosine-3'-phosphate
  modified_base 2: mod_base = OTHER; note = 2'-O-methyladenosine-3'-phosphate
  modified_base 3: mod_base = OTHER; note = 2'-deoxy-2'-fluorocytidine-3'-phosphate
  modified_base 4: mod_base = OTHER; note = 2'-O-methyladenosine-3'-phosphate
  modified_base 5: mod_base = OTHER; note = 2'-deoxy-2'-fluoroguanosine-3'-phosphate
  modified_base 6: mod_base = OTHER; note = 2'-deoxy-2'-fluorouridine-3'-phosphate
  modified_base 7: mod_base = OTHER; note = 2'-deoxy-2'-fluoroguanosine-3'-phosphate
  modified_base 8: mod_base = OTHER; note = 2'-O-methyluridine-3'-phosphate
  modified_base 9: mod_base = OTHER; note = 2'-deoxy-2'-fluorouridine-3'-phosphate
  modified_base 10: mod_base = OTHER; note = 2'-O-methylcytidine-3'-phosphate
  modified_base 11: mod_base = OTHER; note = 2'-deoxy-2'-fluorouridine-3'-phosphate
  modified_base 12: mod_base = OTHER; note = 2'-O-methyluridine-3'-phosphate
  modified_base 13: mod_base = OTHER; note = 2'-deoxy-2'-fluoroguanosine-3'-phosphate
  modified_base 14: mod_base = OTHER; note = 2'-O-methylcytidine-3'-phosphate
  modified_base 15: mod_base = OTHER; note = 2'-deoxy-2'-fluorouridine-3'-phosphate
  modified_base 16: mod_base = OTHER; note = 2'-O-methylcytidine-3'-phosphate
  modified_base 17: mod_base = OTHER; note = 2'-deoxy-2'-fluorouridine-3'-phosphate
  modified_base 18: mod_base = OTHER; note = 2'-O-methyladenosine-3'-phosphate
  modified_base 19: mod_base = OTHER; note = 2'-O-methyluridine-3'-phosphate
  modified_base 20: mod_base = OTHER; note = 2'-O-methyladenosine-3'-phosphorothioate
  modified_base 21: mod_base = OTHER; note = 2'-deoxy-2'-fluoroadenosine
aacagtgttcttgctctataa

SEQ ID NO: 304 - RNA, 21 nt, synthetic construct
  source 1..21: mol_type = other RNA
  modified_base 1: mod_base = OTHER; note = 2'-deoxy-2'-fluoroadenosine-3'-phosphate
  modified_base 2: mod_base = OTHER; note = 2'-O-methyladenosine-3'-phosphate
  modified_base 3: mod_base = OTHER; note = 2'-deoxy-2'-fluorocytidine-3'-phosphate
  modified_base 4: mod_base = OTHER; note = 2'-O-methyladenosine-3'-phosphate
  modified_base 5: mod_base = OTHER; note = 2'-O-methylguanosine-3'-phosphate
  modified_base 6: mod_base = OTHER; note = 2'-O-methyluridine-3'-phosphate
  modified_base 7: mod_base = OTHER; note = 2'-deoxy-2'-fluoroguanosine-3'-phosphate
  modified_base 8: mod_base = OTHER; note = 2'-O-methyluridine-3'-phosphate
  modified_base 9: mod_base = OTHER; note = 2'-deoxy-2'-fluorouridine-3'-phosphate
  modified_base 10: mod_base = OTHER; note = 2'-O-methylcytidine-3'-phosphate
  modified_base 11: mod_base = OTHER; note = 2'-deoxy-2'-fluorouridine-3'-phosphate
  modified_base 12: mod_base = OTHER; note = 2'-O-methyluridine-3'-phosphate
  modified_base 13: mod_base = OTHER; note = 2'-deoxy-2'-fluoroguanosine-3'-phosphate
  modified_base 14: mod_base = OTHER; note = 2'-O-methylcytidine-3'-phosphate
  modified_base 15: mod_base = OTHER; note = 2'-deoxy-2'-fluorouridine-3'-phosphate
  modified_base 16: mod_base = OTHER; note = 2'-O-methylcytidine-3'-phosphate
  modified_base 17: mod_base = OTHER; note = 2'-deoxy-2'-fluorouridine-3'-phosphate
  modified_base 18: mod_base = OTHER; note = 2'-O-methyladenosine-3'-phosphate
  modified_base 19: mod_base = OTHER; note = 2'-deoxy-2'-fluorouridine-3'-phosphate
  modified_base 20: mod_base = OTHER; note = 2'-O-methyladenosine-3'-phosphorothioate
  modified_base 21: mod_base = OTHER; note = 2'-deoxy-2'-fluoroadenosine
aacagtgttcttgctctataa

SEQ ID NO: 305 - RNA, 21 nt, synthetic construct
  source 1..21: mol_type = other RNA
  modified_base 1: mod_base = OTHER; note = 2'-deoxy-2'-fluoroadenosine-3'-phosphate
  modified_base 2: mod_base = OTHER; note = 2'-O-methyladenosine-3'-phosphate
  modified_base 3: mod_base = OTHER; note = 2'-deoxy-2'-fluorocytidine-3'-phosphate
  modified_base 4: mod_base = OTHER; note = 2'-O-methyladenosine-3'-phosphate
  modified_base 5: mod_base = OTHER; note = 2'-deoxy-2'-fluoroguanosine-3'-phosphate
  modified_base 6: mod_base = OTHER; note = 2'-O-methyluridine-3'-phosphate
  modified_base 7: mod_base = OTHER; note = 2'-deoxy-2'-fluoroguanosine-3'-phosphate
  modified_base 8: mod_base = OTHER; note = 2'-O-methyluridine-3'-phosphate
  modified_base 9: mod_base = OTHER; note = 2'-deoxy-2'-fluorouridine-3'-phosphate
  modified_base 10: mod_base = OTHER; note = 2'-O-methylcytidine-3'-phosphate
  modified_base 11: mod_base = OTHER; note = 2'-deoxy-2'-fluorouridine-3'-phosphate
  modified_base 12: mod_base = OTHER; note = 2'-deoxy-2'-fluorouridine-3'-phosphate
  modified_base 13: mod_base = OTHER; note = 2'-deoxy-2'-fluoroguanosine-3'-phosphate
  modified_base 14: mod_base = OTHER; note = 2'-O-methylcytidine-3'-phosphate
  modified_base 15: mod_base = OTHER; note = 2'-deoxy-2'-fluorouridine-3'-phosphate
  modified_base 16: mod_base = OTHER; note = 2'-O-methylcytidine-3'-phosphate
  modified_base 17: mod_base = OTHER; note = 2'-deoxy-2'-fluorouridine-3'-phosphate
  modified_base 18: mod_base = OTHER; note = 2'-O-methyladenosine-3'-phosphate
  modified_base 19: mod_base = OTHER; note = 2'-O-methyluridine-3'-phosphate
  modified_base 20: mod_base = OTHER; note = 2'-O-methyladenosine-3'-phosphorothioate
  modified_base 21: mod_base = OTHER; note = 2'-deoxy-2'-fluoroadenosine
aacagtgttcttgctctataa

SEQ ID NO: 306 - RNA, 21 nt, synthetic construct
  source 1..21: mol_type = other RNA
  modified_base 1: mod_base = OTHER; note = 2'-deoxy-2'-fluoroadenosine-3'-phosphate
  modified_base 2: mod_base = OTHER; note = 2'-O-methyladenosine-3'-phosphate
  modified_base 3: mod_base = OTHER; note = 2'-deoxy-2'-fluorocytidine-3'-phosphate
  modified_base 4: mod_base = OTHER; note = 2'-O-methyladenosine-3'-phosphate
  modified_base 5: mod_base = OTHER; note = 2'-deoxy-2'-fluoroguanosine-3'-phosphate
  modified_base 6: mod_base = OTHER; note = 2'-deoxy-2'-fluorouridine-3'-phosphate
  modified_base 7: mod_base = OTHER; note = 2'-deoxy-2'-fluoroguanosine-3'-phosphate
  modified_base 8: mod_base = OTHER; note = 2'-O-methyluridine-3'-phosphate
  modified_base 9: mod_base = OTHER; note = 2'-deoxy-2'-fluorouridine-3'-phosphate
  modified_base 10: mod_base = OTHER; note = 2'-O-methylcytidine-3'-phosphate
  modified_base 11: mod_base = OTHER; note = 2'-deoxy-2'-fluorouridine-3'-phosphate
  modified_base 12: mod_base = OTHER; note = 2'-O-methyluridine-3'-phosphate
  modified_base 13: mod_base = OTHER; note = 2'-O-methylguanosine-3'-phosphate
  modified_base 14: mod_base = OTHER; note = 2'-O-methylcytidine-3'-phosphate
  modified_base 15: mod_base = OTHER; note = 2'-deoxy-2'-fluorouridine-3'-phosphate
  modified_base 16: mod_base = OTHER; note = 2'-O-methylcytidine-3'-phosphate
  modified_base 17: mod_base = OTHER; note = 2'-deoxy-2'-fluorouridine-3'-phosphate
  modified_base 18: mod_base = OTHER; note = 2'-O-methyladenosine-3'-phosphate
  modified_base 19: mod_base = OTHER; note = 2'-deoxy-2'-fluorouridine-3'-phosphate
  modified_base 20: mod_base = OTHER; note = 2'-O-methyladenosine-3'-phosphorothioate
  modified_base 21: mod_base = OTHER; note = 2'-deoxy-2'-fluoroadenosine
aacagtgttcttgctctataa

SEQ ID NO: 307 - RNA, 21 nt, synthetic construct
  source 1..21: mol_type = other RNA
  modified_base 1: mod_base = OTHER; note = 2'-deoxy-2'-fluoroadenosine-3'-phosphate
  modified_base 2: mod_base = OTHER; note = 2'-O-methyladenosine-3'-phosphate
  modified_base 3: mod_base = OTHER; note = 2'-deoxy-2'-fluorocytidine-3'-phosphate
  modified_base 4: mod_base = OTHER; note = 2'-O-methyladenosine-3'-phosphate
  modified_base 5: mod_base = OTHER; note = 2'-deoxy-2'-fluoroguanosine-3'-phosphate
  modified_base 6: mod_base = OTHER; note = 2'-O-methyluridine-3'-phosphate
  modified_base 7: mod_base = OTHER; note = 2'-O-methylguanosine-3'-phosphate
  modified_base 8: mod_base = OTHER; note = 2'-O-methyluridine-3'-phosphate
  modified_base 9: mod_base = OTHER; note = 2'-deoxy-2'-fluorouridine-3'-phosphate
  modified_base 10: mod_base = OTHER; note = 2'-O-methylcytidine-3'-phosphate
  modified_base 11: mod_base = OTHER; note = 2'-deoxy-2'-fluorouridine-3'-phosphate
  modified_base 12: mod_base = OTHER; note = 2'-deoxy-2'-fluorouridine-3'-phosphate
  modified_base 13: mod_base = OTHER; note = 2'-deoxy-2'-fluoroguanosine-3'-phosphate
  modified_base 14: mod_base = OTHER; note = 2'-O-methylcytidine-3'-phosphate
  modified_base 15: mod_base = OTHER; note = 2'-deoxy-2'-fluorouridine-3'-phosphate
  modified_base 16: mod_base = OTHER; note = 2'-O-methylcytidine-3'-phosphate
  modified_base 17: mod_base = OTHER; note = 2'-deoxy-2'-fluorouridine-3'-phosphate
  modified_base 18: mod_base = OTHER; note = 2'-O-methyladenosine-3'-phosphate
  modified_base 19: mod_base = OTHER; note = 2'-deoxy-2'-fluorouridine-3'-phosphate
  modified_base 20: mod_base = OTHER; note = 2'-O-methyladenosine-3'-phosphorothioate
  modified_base 21: mod_base = OTHER; note = 2'-deoxy-2'-fluoroadenosine
aacagtgttcttgctctataa

SEQ ID NO: 308 - RNA, 21 nt, synthetic construct
  source 1..21: mol_type = other RNA
  modified_base 1: mod_base = OTHER; note = 2'-deoxy-2'-fluoroadenosine-3'-phosphate
  modified_base 2: mod_base = OTHER; note = 2'-deoxy-2'-fluoroadenosine-3'-phosphate
  modified_base 3: mod_base = OTHER; note = 2'-deoxy-2'-fluorocytidine-3'-phosphate
  modified_base 4: mod_base = OTHER; note = 2'-O-methyladenosine-3'-phosphate
  modified_base 5: mod_base = OTHER; note = 2'-O-methylguanosine-3'-phosphate
  modified_base 6: mod_base = OTHER; note = 2'-O-methyluridine-3'-phosphate
  modified_base 7: mod_base = OTHER; note = 2'-deoxy-2'-fluoroguanosine-3'-phosphate
  modified_base 8: mod_base = OTHER; note = 2'-O-methyluridine-3'-phosphate
  modified_base 9: mod_base = OTHER; note = 2'-deoxy-2'-fluorouridine-3'-phosphate
  modified_base 10: mod_base = OTHER; note = 2'-O-methylcytidine-3'-phosphate
  modified_base 11: mod_base = OTHER; note = 2'-deoxy-2'-fluorouridine-3'-phosphate
  modified_base 12: mod_base = OTHER; note = 2'-O-methyluridine-3'-phosphate
  modified_base 13: mod_base = OTHER; note = 2'-deoxy-2'-fluoroguanosine-3'-phosphate
  modified_base 14: mod_base = OTHER; note = 2'-O-methylcytidine-3'-phosphate
  modified_base 15: mod_base = OTHER; note = 2'-deoxy-2'-fluorouridine-3'-phosphate
  modified_base 16: mod_base = OTHER; note = 2'-O-methylcytidine-3'-phosphate
  modified_base 17: mod_base = OTHER; note = 2'-deoxy-2'-fluorouridine-3'-phosphate
  modified_base 18: mod_base = OTHER; note = 2'-O-methyladenosine-3'-phosphate
  modified_base 19: mod_base = OTHER; note = 2'-deoxy-2'-fluorouridine-3'-phosphate
  modified_base 20: mod_base = OTHER; note = 2'-O-methyladenosine-3'-phosphorothioate
  modified_base 21: mod_base = OTHER; note = 2'-deoxy-2'-fluoroadenosine
aacagtgttcttgctctataa

SEQ ID NO: 309 - RNA, 21 nt, synthetic construct
  source 1..21: mol_type = other RNA
  modified_base 1: mod_base = OTHER; note = 2'-deoxy-2'-fluoroadenosine-3'-phosphate
  modified_base 2: mod_base = OTHER; note = 2'-O-methyladenosine-3'-phosphate
  modified_base 3: mod_base = OTHER; note = 2'-deoxy-2'-fluorocytidine-3'-phosphate
  modified_base 4: mod_base = OTHER; note = 2'-O-methyladenosine-3'-phosphate
  modified_base 5: mod_base = OTHER; note = 2'-deoxy-2'-fluoroguanosine-3'-phosphate
  modified_base 6: mod_base = OTHER; note = 2'-O-methyluridine-3'-phosphate
  modified_base 7: mod_base = OTHER; note = 2'-deoxy-2'-fluoroguanosine-3'-phosphate
  modified_base 8: mod_base = OTHER; note = 2'-O-methyluridine-3'-phosphate
  modified_base 9: mod_base = OTHER; note = 2'-O-methyluridine-3'-phosphate
  modified_base 10: mod_base = OTHER; note = 2'-O-methylcytidine-3'-phosphate
  modified_base 11: mod_base = OTHER; note = 2'-deoxy-2'-fluorouridine-3'-phosphate
  modified_base 12: mod_base = OTHER; note = 2'-O-methyluridine-3'-phosphate
  modified_base 13: mod_base = OTHER; note = 2'-deoxy-2'-fluoroguanosine-3'-phosphate
  modified_base 14: mod_base = OTHER; note = 2'-O-methylcytidine-3'-phosphate
  modified_base 15: mod_base = OTHER; note = 2'-deoxy-2'-fluorouridine-3'-phosphate
  modified_base 16: mod_base = OTHER; note = 2'-O-methylcytidine-3'-phosphate
  modified_base 17: mod_base = OTHER; note = 2'-deoxy-2'-fluorouridine-3'-phosphate
  modified_base 18: mod_base = OTHER; note = 2'-O-methyladenosine-3'-phosphate
  modified_base 19: mod_base = OTHER; note = 2'-deoxy-2'-fluorouridine-3'-phosphate
  modified_base 20: mod_base = OTHER; note = 2'-O-methyladenosine-3'-phosphorothioate
  modified_base 21: mod_base = OTHER; note = 2'-deoxy-2'-fluoroadenosine
aacagtgttcttgctctataa

SEQ ID NO: 310 - DNA, 21 bp, synthetic construct
  source 1..21: mol_type = other DNA
  modified_base 1: mod_base = OTHER; note = 2'-O-methyladenosine-3'-phosphate
  modified_base 2: mod_base = OTHER; note = 2'-O-methyladenosine-3'-phosphate
  modified_base 5: mod_base = OTHER; note = 2'-O-methylguanosine-3'-phosphate
  modified_base 6: mod_base = OTHER; note = 2'-O-methyluridine-3'-phosphate
  modified_base 9: mod_base = OTHER; note = 2'-O-methyluridine-3'-phosphate
  modified_base 10: mod_base = OTHER; note = 2'-O-methylcytidine-3'-phosphate
  modified_base 13: mod_base = OTHER; note = 2'-O-methylguanosine-3'-phosphate
  modified_base 14: mod_base = OTHER; note = 2'-O-methylcytidine-3'-phosphate
  modified_base 17: mod_base = OTHER; note = 2'-O-methyluridine-3'-phosphate
  modified_base 18: mod_base = OTHER; note = 2'-O-methyladenosine-3'-phosphate
  modified_base 20: mod_base = OTHER; note = 2'-deoxyadenosine-3'-phosphorothioate
  modified_base 21: mod_base = OTHER; note = 2'-O-methyladenosine
  misc_feature 1..2: note = RNA
  misc_feature 5..6: note = RNA
  misc_feature 9..10: note = RNA
  misc_feature 13..14: note = RNA
  misc_feature 17..18: note = RNA
  misc_feature 21: note = RNA
  misc_feature 3..4: note = DNA
  misc_feature 7..8: note = DNA
  misc_feature 11..12: note = DNA
  misc_feature 15..16: note = DNA
  misc_feature 19..20: note = DNA
aacagtgttcttgctctataa

SEQ ID NO: 311 - DNA, 21 bp, synthetic construct
  source 1..21: mol_type = other DNA
  modified_base 1: mod_base = OTHER; note = 2'-deoxy-2'-fluoroadenosine-3'-phosphate
  modified_base 2: mod_base = OTHER; note = 2'-O-methyladenosine-3'-phosphate
  modified_base 3: mod_base = OTHER; note = 2'-O-methylcytidine-3'-phosphate
  modified_base 4: mod_base = OTHER; note = 2'-O-methyladenosine-3'-phosphate
  modified_base 5: mod_base = OTHER; note = 2'-deoxy-2'-fluoroguanosine-3'-phosphate
  modified_base 6: mod_base = OTHER; note = 2'-O-methyluridine-3'-phosphate
  modified_base 7: mod_base = OTHER; note = 2'-O-methylguanosine-3'-phosphate
  modified_base 8: mod_base = OTHER; note = 2'-O-methyluridine-3'-phosphate
  modified_base 9: mod_base = OTHER; note = 2'-deoxy-2'-fluorouridine-3'-phosphate
  modified_base 10: mod_base = OTHER; note = 2'-O-methylcytidine-3'-phosphate
  modified_base 11: mod_base = OTHER; note = 2'-deoxy-2'-fluorouridine-3'-phosphate
  modified_base 12: mod_base = OTHER; note = 2'-O-methyluridine-3'-phosphate
  modified_base 13: mod_base = OTHER; note = 2'-deoxy-2'-fluoroguanosine-3'-phosphate
  modified_base 15: mod_base = OTHER; note = uridine-3'-phosphate
  modified_base 17: mod_base = OTHER; note = uridine-3'-phosphate
  modified_base 19: mod_base = OTHER; note = 2'-O-methyluridine-3'-phosphate
  modified_base 20: mod_base = OTHER; note = 2'-deoxyadenosine-3'-phosphorothioate
  modified_base 21: mod_base = OTHER; note = 2'-O-methyladenosine
  misc_feature 1..13: note = RNA
  misc_feature 15: note = RNA
  misc_feature 17: note = RNA
  misc_feature 19: note = RNA
  misc_feature 21: note = RNA
  misc_feature 14: note = DNA
  misc_feature 16: note = DNA
  misc_feature 18: note = DNA
  misc_feature 20: note = DNA
aacagtgttcttgctctataa

SEQ ID NO: 312 - DNA, 21 bp, synthetic construct
  source 1..21: mol_type = other DNA
  modified_base 1: mod_base = OTHER; note = 2'-deoxy-2'-fluoroadenosine-3'-phosphate
  modified_base 2: mod_base = OTHER; note = 2'-O-methyladenosine-3'-phosphate
  modified_base 3: mod_base = OTHER; note = 2'-O-methylcytidine-3'-phosphate
  modified_base 4: mod_base = OTHER; note = 2'-O-methyladenosine-3'-phosphate
  modified_base 5: mod_base = OTHER; note = 2'-deoxy-2'-fluoroguanosine-3'-phosphate
  modified_base 6: mod_base = OTHER; note = 2'-O-methyluridine-3'-phosphate
  modified_base 7: mod_base = OTHER; note = 2'-O-methylguanosine-3'-phosphate
  modified_base 8: mod_base = OTHER; note = 2'-O-methyluridine-3'-phosphate
  modified_base 9: mod_base = OTHER; note = 2'-deoxy-2'-fluorouridine-3'-phosphate
  modified_base 10: mod_base = OTHER; note = 2'-O-methylcytidine-3'-phosphate
  modified_base 11: mod_base = OTHER; note = 2'-deoxy-2'-fluorouridine-3'-phosphate
  modified_base 13: mod_base = OTHER; note = 2'-deoxy-2'-fluoroguanosine-3'-phosphate
  modified_base 15: mod_base = OTHER; note = uridine-3'-phosphate
  modified_base 17: mod_base = OTHER; note = uridine-3'-phosphate
  modified_base 19: mod_base = OTHER; note = 2'-O-methyluridine-3'-phosphate
  modified_base 20: mod_base = OTHER; note = 2'-deoxyadenosine-3'-phosphorothioate
  modified_base 21: mod_base = OTHER; note = 2'-O-methyladenosine
  misc_feature 1..11: note = RNA
  misc_feature 13: note = RNA
  misc_feature 15: note = RNA
  misc_feature 17: note = RNA
  misc_feature 19: note = RNA
  misc_feature 21: note = RNA
  misc_feature 12: note = DNA
  misc_feature 14: note = DNA
  misc_feature 16: note = DNA
  misc_feature 18: note = DNA
  misc_feature 20: note = DNA
aacagtgttcttgctctataa

SEQ ID NO: 313 - DNA, 21 bp, synthetic construct
  source 1..21: mol_type = other DNA
  modified_base 1: mod_base = OTHER; note = 2'-deoxy-2'-fluoroadenosine-3'-phosphate
  modified_base 2: mod_base = OTHER; note = 2'-O-methyladenosine-3'-phosphate
  modified_base 3: mod_base = OTHER; note = 2'-O-methylcytidine-3'-phosphate
  modified_base 4: mod_base = OTHER; note = 2'-O-methyladenosine-3'-phosphate
  modified_base 5: mod_base = OTHER; note = 2'-deoxy-2'-fluoroguanosine-3'-phosphate
  modified_base 6: mod_base = OTHER; note = 2'-O-methyluridine-3'-phosphate
  modified_base 7: mod_base = OTHER; note = 2'-O-methylguanosine-3'-phosphate
  modified_base 8: mod_base = OTHER; note = 2'-O-methyluridine-3'-phosphate
  modified_base 9: mod_base = OTHER; note = 2'-deoxy-2'-fluorouridine-3'-phosphate
  modified_base 10: mod_base = OTHER; note = 2'-O-methylcytidine-3'-phosphate
  modified_base 11: mod_base = OTHER; note = 2'-deoxy-2'-fluorouridine-3'-phosphate
  modified_base 12: mod_base = OTHER; note = 2'-O-methyluridine-3'-phosphate
  modified_base 13: mod_base = OTHER; note = 2'-deoxy-2'-fluoroguanosine-3'-phosphate
  modified_base 15: mod_base = OTHER; note = uridine-3'-phosphate
  modified_base 17: mod_base = OTHER; note = uridine-3'-phosphate
  modified_base 19: mod_base = OTHER; note = 2'-O-methyluridine-3'-phosphate
  modified_base 20: mod_base = OTHER; note = 2'-deoxyadenosine-3'-phosphorothioate
  modified_base 21: mod_base = OTHER; note = 2'-O-methyladenosine
  misc_feature 1..13: note = RNA
  misc_feature 15: note = RNA
  misc_feature 17: note = RNA
  misc_feature 19: note = RNA
  misc_feature 21: note = RNA
  misc_feature 14: note = DNA
  misc_feature 16: note = DNA
  misc_feature 18: note = DNA
  misc_feature 20: note = DNA
aacagtgttcttgctctataa

SEQ ID NO: 314 - DNA, 21 bp, synthetic construct
  source 1..21: mol_type = other DNA
  modified_base 1: mod_base = OTHER; note = 2'-deoxy-2'-fluoroadenosine-3'-phosphate
  modified_base 2: mod_base = OTHER; note = 2'-O-methyladenosine-3'-phosphate
  modified_base 3: mod_base = OTHER; note = 2'-O-methylcytidine-3'-phosphate
  modified_base 4: mod_base = OTHER; note = 2'-O-methyladenosine-3'-phosphate
  modified_base 5: mod_base = OTHER; note = 2'-deoxy-2'-fluoroguanosine-3'-phosphate
  modified_base 6: mod_base = OTHER; note = 2'-O-methyluridine-3'-phosphate
  modified_base 7: mod_base = OTHER; note = 2'-O-methylguanosine-3'-phosphate
  modified_base 8: mod_base = OTHER; note = 2'-O-methyluridine-3'-phosphate
  modified_base 9: mod_base = OTHER; note = 2'-deoxy-2'-fluorouridine-3'-phosphate
  modified_base 10: mod_base = OTHER; note = 2'-O-methylcytidine-3'-phosphate
  modified_base 11: mod_base = OTHER; note = 2'-deoxy-2'-fluorouridine-3'-phosphate
  modified_base 13: mod_base = OTHER; note = 2'-deoxy-2'-fluoroguanosine-3'-phosphate
  modified_base 15: mod_base = OTHER; note = uridine-3'-phosphate
  modified_base 17: mod_base = OTHER; note = uridine-3'-phosphate
  modified_base 19: mod_base = OTHER; note = 2'-O-methyluridine-3'-phosphate
  modified_base 20: mod_base = OTHER; note = 2'-deoxyadenosine-3'-phosphorothioate
  modified_base 21: mod_base = OTHER; note = 2'-O-methyladenosine
  misc_feature 1..11: note = RNA
  misc_feature 13: note = RNA
  misc_feature 15: note = RNA
  misc_feature 17: note = RNA
  misc_feature 19: note = RNA
  misc_feature 21: note = RNA
  misc_feature 12: note = DNA
  misc_feature 14: note = DNA
  misc_feature 16: note = DNA
  misc_feature 18: note = DNA
  misc_feature 20: note = DNA
aacagtgttcttgctctataa

SEQ ID NO: 315 - DNA, 21 bp, synthetic construct
  source 1..21: mol_type = other DNA
  modified_base 1: mod_base = OTHER; note = 2'-deoxy-2'-fluoroadenosine-3'-phosphate
  modified_base 2: mod_base = OTHER; note = 2'-O-methyladenosine-3'-phosphate
  modified_base 3: mod_base = OTHER; note = 2'-O-methylcytidine-3'-phosphate
  modified_base 4: mod_base = OTHER; note = 2'-O-methyladenosine-3'-phosphate
  modified_base 5: mod_base = OTHER; note = 2'-deoxy-2'-fluoroadenosine-3'-phosphate
  modified_base 6: mod_base = OTHER; note = 2'-O-methyluridine-3'-phosphate
  modified_base 7: mod_base = OTHER; note = 2'-O-methylguanosine-3'-phosphate
  modified_base 8: mod_base = OTHER; note = 2'-O-methyluridine-3'-phosphate
  modified_base 9: mod_base = OTHER; note = 2'-deoxy-2'-fluorouridine-3'-phosphate
  modified_base 10: mod_base = OTHER; note = 2'-O-methylcytidine-3'-phosphate
  modified_base 11: mod_base = OTHER; note = 2'-deoxy-2'-fluorouridine-3'-phosphate
  modified_base 13: mod_base = OTHER; note = 2'-deoxy-2'-fluoroguanosine-3'-phosphate
  modified_base 15: mod_base = OTHER; note = uridine-3'-phosphate
  modified_base 17: mod_base = OTHER; note = 2'-O-methyluridine-3'-phosphate
  modified_base 19: mod_base = OTHER; note = 2'-O-methyluridine-3'-phosphate
  modified_base 20: mod_base = OTHER; note = 2'-deoxyadenosine-3'-phosphorothioate
  modified_base 21: mod_base = OTHER; note = 2'-O-methyladenosine
  misc_feature 1..11: note = RNA
  misc_feature 13: note = RNA
  misc_feature 15: note = RNA
  misc_feature 17: note = RNA
  misc_feature 19: note = RNA
  misc_feature 21: note = RNA
  misc_feature 12: note = DNA
  misc_feature 14: note = DNA
  misc_feature 16: note = DNA
  misc_feature 18: note = DNA
  misc_feature 20: note = DNA
aacaatgttcttgctctataa

SEQ ID NO: 316 - DNA, 21 bp, synthetic construct
  source 1..21: mol_type = other DNA
  modified_base 1: mod_base = OTHER; note = 2'-deoxy-2'-fluoroadenosine-3'-phosphate
  modified_base 2: mod_base = OTHER; note = 2'-O-methyladenosine-3'-phosphate
  modified_base 3: mod_base = OTHER; note = 2'-deoxy-2'-fluorocytidine-3'-phosphate
  modified_base 4: mod_base = OTHER; note = 2'-O-methyladenosine-3'-phosphate
  modified_base 5: mod_base = OTHER; note = 2'-deoxy-2'-fluoroadenosine-3'-phosphate
  modified_base 6: mod_base = OTHER; note = 2'-O-methyluridine-3'-phosphate
  modified_base 7: mod_base = OTHER; note = 2'-deoxy-2'-fluoroguanosine-3'-phosphate
  modified_base 8: mod_base = OTHER; note = 2'-O-methyluridine-3'-phosphate
  modified_base 9: mod_base = OTHER; note = 2'-deoxy-2'-fluorouridine-3'-phosphate
  modified_base 10: mod_base = OTHER; note = 2'-O-methylcytidine-3'-phosphate
  modified_base 11: mod_base = OTHER; note = 2'-deoxy-2'-fluorouridine-3'-phosphate
  modified_base 12: mod_base = OTHER; note = 2'-O-methyluridine-3'-phosphate
  modified_base 13: mod_base = OTHER; note = 2'-deoxy-2'-fluoroguanosine-3'-phosphate
  modified_base 14: mod_base = OTHER; note = 2'-O-methylcytidine-3'-phosphate
  modified_base 15: mod_base = OTHER; note = 2'-deoxy-2'-fluorouridine-3'-phosphate
  modified_base 16: mod_base = OTHER; note = 2'-O-methylcytidine-3'-phosphate
  modified_base 17: mod_base = OTHER; note = 2'-deoxy-2'-fluorouridine-3'-phosphate
  modified_base 20: mod_base = OTHER; note = 2'-deoxyadenosine-3'-phosphorothioate
  misc_feature 1..17: note = RNA
  misc_feature 18..21: note = DNA
aacaatgttcttgctctataa

SEQ ID NO: 317 - DNA, 21 bp, synthetic construct
  source 1..21: mol_type = other DNA
  modified_base 1: mod_base = OTHER; note = 2'-deoxy-2'-fluoroadenosine-3'-phosphate
  modified_base 2: mod_base = OTHER; note = 2'-O-methyladenosine-3'-phosphate
  modified_base 3: mod_base = OTHER; note = 2'-O-methylcytidine-3'-phosphate
  modified_base 4: mod_base = OTHER; note = 2'-O-methyladenosine-3'-phosphate
  modified_base 5: mod_base = OTHER; note = 2'-deoxy-2'-fluoroguanosine-3'-phosphate
  modified_base 6: mod_base = OTHER; note = 2'-O-methyluridine-3'-phosphate
  modified_base 7: mod_base = OTHER; note = 2'-O-methylguanosine-3'-phosphate
  modified_base 8: mod_base = OTHER; note = 2'-O-methyluridine-3'-phosphate
  modified_base 9: mod_base = OTHER; note = 2'-deoxy-2'-fluorouridine-3'-phosphate
  modified_base 10: mod_base = OTHER; note = 2'-O-methylcytidine-3'-phosphate
  modified_base 11: mod_base = OTHER; note = 2'-deoxy-2'-fluorouridine-3'-phosphate
  modified_base 12: mod_base = OTHER; note = 2'-O-methyluridine-3'-phosphate
  modified_base 13: mod_base = OTHER; note = 2'-deoxy-2'-fluoroguanosine-3'-phosphate
  modified_base 15: mod_base = OTHER; note = uridine-3'-phosphate
  modified_base 17: mod_base = OTHER; note = uridine-3'-phosphate
  modified_base 19: mod_base = OTHER; note = 2'-O-methyluridine-3'-phosphate
  modified_base 20: mod_base = OTHER; note = 2'-deoxyadenosine-3'-phosphorothioate
  modified_base 21: mod_base = OTHER; note = 2'-O-methyladenosine
  misc_feature 1..13: note = RNA
  misc_feature 15: note = RNA
  misc_feature 17: note = RNA
  misc_feature 19: note = RNA
  misc_feature 21: note = RNA
  misc_feature 14: note = DNA
  misc_feature 16: note = DNA
  misc_feature 18: note = DNA
  misc_feature 20: note = DNA
aacagtgttcttgctctataa

SEQ ID NO: 318 - RNA, 21 nt, synthetic construct
  source 1..21: mol_type = other RNA
  modified_base 1: mod_base = OTHER; note = 2'-deoxy-2'-fluoroadenosine-3'-phosphate
  modified_base 2: mod_base = OTHER; note = 2'-deoxy-2'-fluoroadenosine-3'-phosphate
  modified_base 3: mod_base = OTHER; note = 2'-deoxy-2'-fluorocytidine-3'-phosphate
  modified_base 4: mod_base = OTHER; note = 2'-O-methyladenosine-3'-phosphate
  modified_base 5: mod_base = OTHER; note = 2'-deoxy-2'-fluoroguanosine-3'-phosphate
  modified_base 6: mod_base = OTHER; note = 2'-O-methyluridine-3'-phosphate
  modified_base 7: mod_base = OTHER; note = 2'-deoxy-2'-fluoroguanosine-3'-phosphate
  modified_base 8: mod_base = OTHER; note = 2'-O-methyluridine-3'-phosphate
  modified_base 9: mod_base = OTHER; note = 2'-O-methyluridine-3'-phosphate
  modified_base 10: mod_base = OTHER; note = 2'-O-methylcytidine-3'-phosphate
  modified_base 11: mod_base = OTHER; note = 2'-deoxy-2'-fluorouridine-3'-phosphate
  modified_base 12: mod_base = OTHER; note = 2'-O-methyluridine-3'-phosphate
  modified_base 13: mod_base = OTHER; note = 2'-deoxy-2'-fluoroguanosine-3'-phosphate
  modified_base 14: mod_base = OTHER; note = 2'-O-methylcytidine-3'-phosphate
  modified_base 15: mod_base = OTHER; note = 2'-deoxy-2'-fluorouridine-3'-phosphate
  modified_base 16: mod_base = OTHER; note = 2'-O-methylcytidine-3'-phosphate
  modified_base 17: mod_base = OTHER; note = 2'-deoxy-2'-fluorouridine-3'-phosphate
  modified_base 18: mod_base = OTHER; note = 2'-O-methyladenosine-3'-phosphate
  modified_base 19: mod_base = OTHER; note = 2'-deoxy-2'-fluorouridine-3'-phosphate
  modified_base 20: mod_base = OTHER; note = 2'-O-methyladenosine-3'-phosphorothioate
  modified_base 21: mod_base = OTHER; note = 2'-deoxy-2'-fluoroadenosine
aacagtgttcttgctctataa

SEQ ID NO: 319 - RNA, 21 nt, synthetic construct
  source 1..21: mol_type = other RNA
  modified_base 1: mod_base = OTHER; note = 2'-deoxy-2'-fluoroadenosine-3'-phosphate
  modified_base 2: mod_base = OTHER; note = 2'-O-methyladenosine-3'-phosphate
  modified_base 3: mod_base = OTHER; note = 2'-deoxy-2'-fluorocytidine-3'-phosphate
  modified_base 4: mod_base = OTHER; note = 2'-O-methyladenosine-3'-phosphate
  modified_base 5: mod_base = OTHER; note = 2'-deoxy-2'-fluoroguanosine-3'-phosphate
  modified_base 6: mod_base = OTHER; note = 2'-O-methyluridine-3'-phosphate
  modified_base 7: mod_base = OTHER; note = 2'-deoxy-2'-fluoroguanosine-3'-phosphate
  modified_base 8: mod_base = OTHER; note = 2'-O-methyluridine-3'-phosphate
  modified_base 9: mod_base = OTHER; note = 2'-deoxy-2'-fluorouridine-3'-phosphate
  modified_base 10: mod_base = OTHER; note = 2'-O-methylcytidine-3'-phosphate
  modified_base 11: mod_base = OTHER; note = 2'-deoxy-2'-fluorouridine-3'-phosphate
  modified_base 12: mod_base = OTHER; note = 2'-O-methyluridine-3'-phosphate
  modified_base 13: mod_base = OTHER; note = 2'-deoxy-2'-fluoroguanosine-3'-phosphate
  modified_base 14: mod_base = OTHER; note = 2'-O-methylcytidine-3'-phosphate
  modified_base 15: mod_base = OTHER; note = 2'-deoxy-2'-fluorouridine-3'-phosphate
  modified_base 16: mod_base = OTHER; note = 2'-O-methylcytidine-3'-phosphate
  modified_base 17: mod_base = OTHER; note = 2'-deoxy-2'-fluorouridine-3'-phosphate
  modified_base 18: mod_base = OTHER; note = 2'-O-methyladenosine-3'-phosphate
  modified_base 19: mod_base = OTHER; note = 2'-deoxy-2'-fluorouridine-3'-phosphate
  modified_base 20: mod_base = OTHER; note = 2'-O-methyladenosine-3'-phosphorothioate
  modified_base 21: mod_base = OTHER; note = 2'-deoxy-2'-fluoroadenosine
aacagtgttcttgctctataa

SEQ ID NO: 320 - RNA, 21 nt, synthetic construct
  source 1..21: mol_type = other RNA
  modified_base 1: mod_base = OTHER; note = 2'-deoxy-2'-fluoroadenosine-3'-phosphate
  modified_base 2: mod_base = OTHER; note = 2'-O-methyladenosine-3'-phosphate
  modified_base 3: mod_base = OTHER; note = 2'-deoxy-2'-fluorocytidine-3'-phosphate
  modified_base 4: mod_base = OTHER; note = 2'-O-methyladenosine-3'-phosphate
  modified_base 5: mod_base = OTHER; note = 2'-deoxy-2'-fluoroguanosine-3'-phosphate
  modified_base 6: mod_base = OTHER; note = 2'-O-methyluridine-3'-phosphate
  modified_base 7: mod_base = OTHER; note = 2'-deoxy-2'-fluoroguanosine-3'-phosphate
  modified_base 8: mod_base = OTHER; note = 2'-O-methyluridine-3'-phosphate
  modified_base 9: mod_base = OTHER; note = 2'-deoxy-2'-fluorouridine-3'-phosphate
  modified_base 10: mod_base = OTHER; note = 2'-O-methylcytidine-3'-phosphate
  modified_base 11: mod_base = OTHER; note = 2'-deoxy-2'-fluorouridine-3'-phosphate
  modified_base 12: mod_base = OTHER; note = 2'-O-methyluridine-3'-phosphate
  modified_base 13: mod_base = OTHER; note = 2'-deoxy-2'-fluoroguanosine-3'-phosphate
  modified_base 14: mod_base = OTHER; note = 2'-O-methylcytidine-3'-phosphate
  modified_base 15: mod_base = OTHER; note = 2'-deoxy-2'-fluorouridine-3'-phosphate
  modified_base 16: mod_base = OTHER; note = 2'-O-methylcytidine-3'-phosphate
  modified_base 17: mod_base = OTHER; note = 2'-deoxy-2'-fluorouridine-3'-phosphate
  modified_base 18: mod_base = OTHER; note = 2'-O-methyladenosine-3'-phosphate
  modified_base 19: mod_base = OTHER; note = 2'-deoxy-2'-fluorouridine-3'-phosphate
  modified_base 20: mod_base = OTHER; note = 2'-O-methyladenosine-3'-phosphorothioate
  modified_base 21: mod_base = OTHER; note = 2'-deoxy-2'-fluoroadenosine
aacagtgttcttgctctataa

SEQ ID NO: 321 - RNA, 21 nt, synthetic construct
  source 1..21: mol_type = other RNA
  modified_base 1: mod_base = OTHER; note = 2'-deoxy-2'-fluoroadenosine-3'-phosphate
  modified_base 2: mod_base = OTHER; note = 2'-O-methyladenosine-3'-phosphate
  modified_base 3: mod_base = OTHER; note = 2'-deoxy-2'-fluorocytidine-3'-phosphate
  modified_base 4: mod_base = OTHER; note = 2'-O-methyladenosine-3'-phosphate
  modified_base 5: mod_base = OTHER; note = 2'-deoxy-2'-fluoroguanosine-3'-phosphate
  modified_base 6: mod_base = OTHER; note = 2'-O-methyluridine-3'-phosphate
  modified_base 7: mod_base = OTHER; note = 2'-deoxy-2'-fluoroguanosine-3'-phosphate
  modified_base 8: mod_base = OTHER; note = 2'-O-methyluridine-3'-phosphate
  modified_base 9: mod_base = OTHER; note = 2'-deoxy-2'-fluorouridine-3'-phosphate
  modified_base 10: mod_base = OTHER; note = 2'-O-methylcytidine-3'-phosphate
  modified_base 11: mod_base = OTHER; note = 2'-deoxy-2'-fluorouridine-3'-phosphate
  modified_base 12: mod_base = OTHER; note = 2'-O-methyluridine-3'-phosphate
  modified_base 13: mod_base = OTHER; note = 2'-deoxy-2'-fluoroguanosine-3'-phosphate
  modified_base 14: mod_base = OTHER; note = 2'-O-methylcytidine-3'-phosphate
  modified_base 15: mod_base = OTHER; note = 2'-deoxy-2'-fluorouridine-3'-phosphate
  modified_base 16: mod_base = OTHER; note = 2'-O-methylcytidine-3'-phosphate
  modified_base 17: mod_base = OTHER; note = 2'-deoxy-2'-fluorouridine-3'-phosphate
  modified_base 18: mod_base = OTHER; note = 2'-O-methyladenosine-3'-phosphate
  modified_base 19: mod_base = OTHER; note = 2'-O-methyluridine-3'-phosphate
  modified_base 20: mod_base = OTHER; note = 2'-O-methyladenosine-3'-phosphorothioate
  modified_base 21: mod_base = OTHER; note = 2'-deoxy-2'-fluoroadenosine
aacagtgttcttgctctataa

SEQ ID NO: 322 - RNA, 21 nt, synthetic construct
  source 1..21: mol_type = other RNA
  modified_base 1: mod_base = OTHER; note = 2'-deoxy-2'-fluoroadenosine-3'-phosphate
  modified_base 2: mod_base = OTHER; note = 2'-O-methyladenosine-3'-phosphate
  modified_base 3: mod_base = OTHER; note = 2'-O-methylcytidine-3'-phosphate
  modified_base 4: mod_base = OTHER; note = 2'-O-methyladenosine-3'-phosphate
  modified_base 5: mod_base = OTHER; note = 2'-deoxy-2'-fluoroguanosine-3'-phosphate
  modified_base 6: mod_base = OTHER; note = 2'-O-methyluridine-3'-phosphate
  modified_base 7: mod_base = OTHER; note = 2'-deoxy-2'-fluoroguanosine-3'-phosphate
  modified_base 8: mod_base = OTHER; note = 2'-O-methyluridine-3'-phosphate
  modified_base 9: mod_base = OTHER; note = 2'-deoxy-2'-fluorouridine-3'-phosphate
  modified_base 10: mod_base = OTHER; note = 2'-O-methylcytidine-3'-phosphate
  modified_base 11: mod_base = OTHER; note = 2'-deoxy-2'-fluorouridine-3'-phosphate
  modified_base 12: mod_base = OTHER; note = 2'-O-methyluridine-3'-phosphate
  modified_base 13: mod_base = OTHER; note = 2'-deoxy-2'-fluoroguanosine-3'-phosphate
  modified_base 14: mod_base = OTHER; note = 2'-O-methylcytidine-3'-phosphate
  modified_base 15: mod_base = OTHER; note = 2'-deoxy-2'-fluorouridine-3'-phosphate
  modified_base 16: mod_base = OTHER; note = 2'-O-methylcytidine-3'-phosphate
  modified_base 17: mod_base = OTHER; note = 2'-deoxy-2'-fluorouridine-3'-phosphate
  modified_base 18: mod_base = OTHER; note = 2'-O-methyladenosine-3'-phosphate
  modified_base 19: mod_base = OTHER; note = 2'-deoxy-2'-fluorouridine-3'-phosphate
  modified_base 20: mod_base = OTHER; note = 2'-O-methyladenosine-3'-phosphorothioate
  modified_base 21: mod_base = OTHER; note = 2'-deoxy-2'-fluoroadenosine
aacagtgttcttgctctataa

SEQ ID NO: 323 - RNA, 21 nt, synthetic construct
  source 1..21: mol_type = other RNA
  modified_base 1: mod_base = OTHER; note = 2'-deoxy-2'-fluoroadenosine-3'-phosphate
  modified_base 2: mod_base = OTHER; note = 2'-deoxy-2'-fluoroadenosine-3'-phosphate
  modified_base 3: mod_base = OTHER; note = 2'-deoxy-2'-fluorocytidine-3'-phosphate
  modified_base 4: mod_base = OTHER; note = 2'-O-methyladenosine-3'-phosphate
  modified_base 5: mod_base = OTHER; note = 2'-deoxy-2'-fluoroguanosine-3'-phosphate
  modified_base 6: mod_base = OTHER; note = 2'-O-methyluridine-3'-phosphate
  modified_base 7: mod_base = OTHER; note = 2'-O-methylguanosine-3'-phosphate
  modified_base 8: mod_base = OTHER; note = 2'-O-methyluridine-3'-phosphate
  modified_base 9: mod_base = OTHER; note = 2'-deoxy-2'-fluorouridine-3'-phosphate
  modified_base 10: mod_base = OTHER; note = 2'-O-methylcytidine-3'-phosphate
  modified_base 11: mod_base = OTHER; note = 2'-deoxy-2'-fluorouridine-3'-phosphate
  modified_base 12: mod_base = OTHER; note = 2'-O-methyluridine-3'-phosphate
  modified_base 13: mod_base = OTHER; note = 2'-deoxy-2'-fluoroguanosine-3'-phosphate
  modified_base 14: mod_base = OTHER; note = 2'-O-methylcytidine-3'-phosphate
  modified_base 15: mod_base = OTHER; note = 2'-deoxy-2'-fluorouridine-3'-phosphate
  modified_base 16: mod_base = OTHER; note = 2'-O-methylcytidine-3'-phosphate
  modified_base 17: mod_base = OTHER; note = 2'-deoxy-2'-fluorouridine-3'-phosphate
  modified_base 18: mod_base = OTHER; note = 2'-O-methyladenosine-3'-phosphate
  modified_base 19: mod_base = OTHER; note = 2'-deoxy-2'-fluorouridine-3'-phosphate
  modified_base 20: mod_base = OTHER; note = 2'-O-methyladenosine-3'-phosphorothioate
  modified_base 21: mod_base = OTHER; note = 2'-deoxy-2'-fluoroadenosine
aacagtgttcttgctctataa

SEQ ID NO: 324 - RNA, 21 nt, synthetic construct
  source 1..21: mol_type = other RNA
  modified_base 1: mod_base = OTHER; note = 2'-deoxy-2'-fluoroadenosine-3'-phosphate
  modified_base 2: mod_base = OTHER; note = 2'-O-methyladenosine-3'-phosphate
  modified_base 3: mod_base = OTHER; note = 2'-deoxy-2'-fluorocytidine-3'-phosphate
  modified_base 4: mod_base = OTHER; note = 2'-O-methyladenosine-3'-phosphate
  modified_base 5: mod_base = OTHER; note = 2'-deoxy-2'-fluoroguanosine-3'-phosphate
  modified_base 6: mod_base = OTHER; note = 2'-O-methyluridine-3'-phosphate
  modified_base 7: mod_base = OTHER; note = 2'-deoxy-2'-fluoroguanosine-3'-phosphate
  modified_base 8: mod_base = OTHER; note = 2'-O-methyluridine-3'-phosphate
  modified_base 9: mod_base = OTHER; note = 2'-deoxy-2'-fluorouridine-3'-phosphate
  modified_base 10: mod_base = OTHER; note = 2'-O-methylcytidine-3'-phosphate
  modified_base 11: mod_base = OTHER; note = 2'-deoxy-2'-fluorouridine-3'-phosphate
  modified_base 12: mod_base = OTHER; note = 2'-O-methyluridine-3'-phosphate
  modified_base 13: mod_base = OTHER; note = 2'-deoxy-2'-fluoroguanosine-3'-phosphate
  modified_base 14: mod_base = OTHER; note = 2'-O-methylcytidine-3'-phosphate
  modified_base 15: mod_base = OTHER; note = 2'-deoxy-2'-fluorouridine-3'-phosphate
  modified_base 16: mod_base = OTHER; note = 2'-O-methylcytidine-3'-phosphate
  modified_base 17: mod_base = OTHER; note = 2'-deoxy-2'-fluorouridine-3'-phosphate
  modified_base 18: mod_base = OTHER; note = 2'-O-methyladenosine-3'-phosphate
  modified_base 19: mod_base = OTHER; note = 2'-deoxy-2'-fluorouridine-3'-phosphate
  modified_base 20: mod_base = OTHER; note = 2'-O-methyladenosine-3'-phosphorothioate
  modified_base 21: mod_base = OTHER; note = 2'-deoxy-2'-fluoroadenosine
aacagtgttcttgctctataa

SEQ ID NO: 325 - RNA, 21 nt, synthetic construct
  source 1..21: mol_type = other RNA
  modified_base 1: mod_base = OTHER; note = 2'-deoxy-2'-fluoroadenosine-3'-phosphate
  modified_base 2: mod_base = OTHER; note = 2'-O-methyladenosine-3'-phosphate
  modified_base 3: mod_base = OTHER; note = 2'-deoxy-2'-fluorocytidine-3'-phosphate
  modified_base 4: mod_base = OTHER; note = 2'-O-methyladenosine-3'-phosphate
  modified_base 5: mod_base = OTHER; note = 2'-deoxy-2'-fluoroguanosine-3'-phosphate
  modified_base 6: mod_base = OTHER; note = 2'-O-methyluridine-3'-phosphate
  modified_base 7: mod_base = OTHER; note = 2'-deoxy-2'-fluoroguanosine-3'-phosphate
  modified_base 8: mod_base = OTHER; note = 2'-O-methyluridine-3'-phosphate
  modified_base 9: mod_base = OTHER; note = 2'-deoxy-2'-fluorouridine-3'-phosphate
  modified_base 10: mod_base = OTHER; note = 2'-O-methylcytidine-3'-phosphate
  modified_base 11: mod_base = OTHER; note = 2'-deoxy-2'-fluorouridine-3'-phosphate
  modified_base 12: mod_base = OTHER; note = 2'-O-methyluridine-3'-phosphate
  modified_base 13: mod_base = OTHER; note = 2'-deoxy-2'-fluoroguanosine-3'-phosphate
  modified_base 14: mod_base = OTHER; note = 2'-O-methylcytidine-3'-phosphate
  modified_base 15: mod_base = OTHER; note = 2'-deoxy-2'-fluorouridine-3'-phosphate
  modified_base 16: mod_base = OTHER; note = 2'-O-methylcytidine-3'-phosphate
  modified_base 17: mod_base = OTHER; note = 2'-deoxy-2'-fluorouridine-3'-phosphate
  modified_base 18: mod_base = OTHER; note = 2'-O-methyladenosine-3'-phosphate
  modified_base 19: mod_base = OTHER; note = 2'-deoxy-2'-fluorouridine-3'-phosphate
  modified_base 20: mod_base = OTHER; note = 2'-O-methyladenosine-3'-phosphorothioate
  modified_base 21: mod_base = OTHER; note = 2'-deoxy-2'-fluoroadenosine
aacagtgttcttgctctataa

SEQ ID NO: 326 - RNA, 21 nt, synthetic construct
  source 1..21: mol_type = other RNA
  modified_base 1: mod_base = OTHER; note = 2'-deoxy-2'-fluoroadenosine-3'-phosphate
  modified_base 2: mod_base = OTHER; note = 2'-O-methyladenosine-3'-phosphate
  modified_base 3: mod_base = OTHER; note = 2'-deoxy-2'-fluorocytidine-3'-phosphate
  modified_base 4: mod_base = OTHER; note = 2'-O-methyladenosine-3'-phosphate
  modified_base 5: mod_base = OTHER; note = 2'-deoxy-2'-fluoroguanosine-3'-phosphate
  modified_base 6: mod_base = OTHER; note = 2'-O-methyluridine-3'-phosphate
  modified_base 7: mod_base = OTHER; note = 2'-deoxy-2'-fluoroguanosine-3'-phosphate
  modified_base 8: mod_base = OTHER; note = 2'-O-methyluridine-3'-phosphate
  modified_base 9: mod_base = OTHER; note = 2'-deoxy-2'-fluorouridine-3'-phosphate
  modified_base 10: mod_base = OTHER; note = 2'-O-methylcytidine-3'-phosphate
  modified_base 11: mod_base = OTHER; note = 2'-deoxy-2'-fluorouridine-3'-phosphate
  modified_base 12: mod_base = OTHER; note = 2'-O-methyluridine-3'-phosphate
  modified_base 13: mod_base = OTHER; note = 2'-deoxy-2'-fluoroguanosine-3'-phosphate
  modified_base 14: mod_base = OTHER; note = 2'-O-methylcytidine-3'-phosphate
  modified_base 15: mod_base = OTHER; note = 2'-deoxy-2'-fluorouridine-3'-phosphate
  modified_base 16: mod_base = OTHER; note = 2'-deoxy-2'-fluorocytidine-3'-phosphate
  modified_base 17: mod_base = OTHER; note = 2'-deoxy-2'-fluorouridine-3'-phosphate
  modified_base 18: mod_base = OTHER; note = 2'-O-methyladenosine-3'-phosphate
  modified_base 19: mod_base = OTHER; note = 2'-deoxy-2'-fluorouridine-3'-phosphate
  modified_base 20: mod_base = OTHER; note = 2'-O-methyladenosine-3'-phosphorothioate
  modified_base 21: mod_base = OTHER; note = 2'-deoxy-2'-fluoroadenosine
aacagtgttcttgctctataa

SEQ ID NO: 327 - RNA, 21 nt, synthetic construct
  source 1..21: mol_type = other RNA
  modified_base 1: mod_base = OTHER; note = 2'-deoxy-2'-fluoroadenosine-3'-phosphate
  modified_base 2: mod_base = OTHER; note = 2'-O-methyladenosine-3'-phosphate
  modified_base 3: mod_base = OTHER; note = 2'-deoxy-2'-fluorocytidine-3'-phosphate
  modified_base 4: mod_base = OTHER; note = 2'-O-methyladenosine-3'-phosphate
  modified_base 5: mod_base = OTHER; note = 2'-deoxy-2'-fluoroguanosine-3'-phosphate
  modified_base 6: mod_base = OTHER; note = 2'-O-methyluridine-3'-phosphate
  modified_base 7: mod_base = OTHER; note = 2'-deoxy-2'-fluoroguanosine-3'-phosphate
  modified_base 8: mod_base = OTHER; note = 2'-O-methyluridine-3'-phosphate
  modified_base 9: mod_base = OTHER; note = 2'-deoxy-2'-fluorouridine-3'-phosphate
  modified_base 10: mod_base = OTHER; note = 2'-O-methylcytidine-3'-phosphate
  modified_base 11: mod_base = OTHER; note = 2'-O-methyluridine-3'-phosphate
  modified_base 12: mod_base = OTHER; note = 2'-O-methyluridine-3'-phosphate
  modified_base 13: mod_base = OTHER; note = 2'-deoxy-2'-fluoroguanosine-3'-phosphate
  modified_base 14: mod_base = OTHER; note = 2'-O-methylcytidine-3'-phosphate
  modified_base 15: mod_base = OTHER; note = 2'-deoxy-2'-fluorouridine-3'-phosphate
  modified_base 16: mod_base = OTHER; note = 2'-O-methylcytidine-3'-phosphate
  modified_base 17: mod_base = OTHER; note = 2'-deoxy-2'-fluorouridine-3'-phosphate
  modified_base 18: mod_base = OTHER; note = 2'-O-methyladenosine-3'-phosphate
  modified_base 19: mod_base = OTHER; note = 2'-deoxy-2'-fluorouridine-3'-phosphate
  modified_base 20: mod_base = OTHER; note = 2'-O-methyladenosine-3'-phosphorothioate
  modified_base 21: mod_base = OTHER; note = 2'-deoxy-2'-fluoroadenosine
aacagtgttcttgctctataa

SEQ ID NO: 328 - RNA, 21 nt, synthetic construct
  source 1..21: mol_type = other RNA
  modified_base 1: mod_base = OTHER; note = 2'-deoxy-2'-fluoroadenosine-3'-phosphate
  modified_base 2: mod_base = OTHER; note = 2'-O-methyladenosine-3'-phosphate
  modified_base 3: mod_base = OTHER; note = 2'-deoxy-2'-fluorocytidine-3'-phosphate
  modified_base 4: mod_base = OTHER; note = 2'-O-methyladenosine-3'-phosphate
  modified_base 5: mod_base = OTHER; note = 2'-deoxy-2'-fluoroguanosine-3'-phosphate
  modified_base 6: mod_base = OTHER; note = 2'-O-methyluridine-3'-phosphate
  modified_base 7: mod_base = OTHER; note = 2'-deoxy-2'-fluoroguanosine-3'-phosphate
  modified_base 8: mod_base = OTHER; note = 2'-O-methyluridine-3'-phosphate
  modified_base 9: mod_base = OTHER; note = 2'-deoxy-2'-fluorouridine-3'-phosphate
  modified_base 10: mod_base = OTHER; note = 2'-O-methylcytidine-3'-phosphate
  modified_base 11: mod_base = OTHER; note = 2'-deoxy-2'-fluorouridine-3'-phosphate
  modified_base 12: mod_base = OTHER; note = 2'-O-methyluridine-3'-phosphate
  modified_base 13: mod_base = OTHER; note = 2'-deoxy-2'-fluoroguanosine-3'-phosphate
  modified_base 14: mod_base = OTHER; note = 2'-O-methylcytidine-3'-phosphate
  modified_base 15: mod_base = OTHER; note = 2'-deoxy-2'-fluorouridine-3'-phosphate
  modified_base 16: mod_base = OTHER; note = 2'-O-methylcytidine-3'-phosphate
  modified_base 17: mod_base = OTHER; note = 2'-O-methyluridine-3'-phosphate
  modified_base 18: mod_base = OTHER; note = 2'-O-methyladenosine-3'-phosphate
  modified_base 19: mod_base = OTHER; note = 2'-deoxy-2'-fluorouridine-3'-phosphate
  modified_base 20: mod_base = OTHER; note = 2'-O-methyladenosine-3'-phosphorothioate
  modified_base 21: mod_base = OTHER; note = 2'-deoxy-2'-fluoroadenosine
aacagtgttcttgctctataa

SEQ ID NO: 329 - RNA, 21 nt, synthetic construct
  source 1..21: mol_type = other RNA
  modified_base 1: mod_base = OTHER; note = 2'-deoxy-2'-fluoroadenosine-3'-phosphate
  modified_base 2: mod_base = OTHER; note = 2'-deoxy-2'-fluoroadenosine-3'-phosphate
  modified_base 3: mod_base = OTHER; note = 2'-deoxy-2'-fluorocytidine-3'-phosphate
  modified_base 4: mod_base = OTHER; note = 2'-O-methyladenosine-3'-phosphate
  modified_base 5: mod_base = OTHER; note = 2'-deoxy-2'-fluoroguanosine-3'-phosphate
  modified_base 6: mod_base = OTHER; note = 2'-O-methyluridine-3'-phosphate
  modified_base 7: mod_base = OTHER; note = 2'-deoxy-2'-fluoroguanosine-3'-phosphate
  modified_base 8: mod_base = OTHER; note = 2'-O-methyluridine-3'-phosphate
  modified_base 9: mod_base = OTHER; note = 2'-deoxy-2'-fluorouridine-3'-phosphate
  modified_base 10: mod_base = OTHER; note = 2'-O-methylcytidine-3'-phosphate
  modified_base 11: mod_base = OTHER; note = 2'-deoxy-2'-fluorouridine-3'-phosphate
  modified_base 12: mod_base = OTHER; note = 2'-O-methyluridine-3'-phosphate
  modified_base 13: mod_base = OTHER; note = 2'-deoxy-2'-fluoroguanosine-3'-phosphate
  modified_base 14: mod_base = OTHER; note = 2'-O-methylcytidine-3'-phosphate
  modified_base 15: mod_base = OTHER; note = 2'-deoxy-2'-fluorouridine-3'-phosphate
  modified_base 16: mod_base = OTHER; note = 2'-O-methylcytidine-3'-phosphate
  modified_base 17: mod_base = OTHER; note = 2'-deoxy-2'-fluorouridine-3'-phosphate
  modified_base 18: mod_base = OTHER; note = 2'-O-methyladenosine-3'-phosphate
  modified_base 19: mod_base = OTHER; note = 2'-deoxy-2'-fluorouridine-3'-phosphate
  modified_base 20: mod_base = OTHER; note = 2'-O-methyladenosine-3'-phosphorothioate
  modified_base 21: mod_base = OTHER; note = 2'-deoxy-2'-fluoroadenosine
aacagtgttcttgctctataa

SEQ ID NO: 330 - RNA, 21 nt, synthetic construct
  source 1..21: mol_type = other RNA
  modified_base 1: mod_base = OTHER; note = 2'-deoxy-2'-fluoroadenosine-3'-phosphate
  modified_base 2: mod_base = OTHER; note = 2'-deoxy-2'-fluoroadenosine-3'-phosphate
  modified_base 3: mod_base = OTHER; note = 2'-deoxy-2'-fluorocytidine-3'-phosphate
  modified_base 4: mod_base = OTHER; note = 2'-O-methyladenosine-3'-phosphate
  modified_base 5: mod_base = OTHER; note = 2'-deoxy-2'-fluoroguanosine-3'-phosphate
  modified_base 6: mod_base = OTHER; note = 2'-O-methyluridine-3'-phosphate
  modified_base 7: mod_base = OTHER; note = 2'-deoxy-2'-fluoroguanosine-3'-phosphate
  modified_base 8: mod_base = OTHER; note = 2'-O-methyluridine-3'-phosphate
  modified_base 9: mod_base = OTHER; note = 2'-deoxy-2'-fluorouridine-3'-phosphate
  modified_base 10: mod_base = OTHER; note = 2'-O-methylcytidine-3'-phosphate
  modified_base 11: mod_base = OTHER; note = 2'-deoxy-2'-fluorouridine-3'-phosphate
  modified_base 12: mod_base = OTHER; note = 2'-O-methyluridine-3'-phosphate
  modified_base 13: mod_base = OTHER; note = 2'-deoxy-2'-fluoroguanosine-3'-phosphate
  modified_base 14: mod_base = OTHER; note = 2'-O-methylcytidine-3'-phosphate
  modified_base 15: mod_base = OTHER; note = 2'-deoxy-2'-fluorouridine-3'-phosphate
  modified_base 16: mod_base = OTHER; note = 2'-O-methylcytidine-3'-phosphate
  modified_base 17: mod_base = OTHER; note = 2'-deoxy-2'-fluorouridine-3'-phosphate
  modified_base 18: mod_base = OTHER; note = 2'-O-methyladenosine-3'-phosphate
  modified_base 19: mod_base = OTHER; note = 2'-deoxy-2'-fluorouridine-3'-phosphate
  modified_base 20: mod_base = OTHER; note = 2'-O-methyladenosine-3'-phosphorothioate
  modified_base 21: mod_base = OTHER; note = 2'-deoxy-2'-fluoroadenosine
aacagtgttcttgctctataa

SEQ ID NO: 331 - RNA, 21 nt, synthetic construct
  source 1..21: mol_type = other RNA
  modified_base 1: mod_base = OTHER; note = 2'-deoxy-2'-fluoroadenosine-3'-phosphate
  modified_base 2: mod_base = OTHER; note = 2'-O-methyladenosine-3'-phosphate
  modified_base 3: mod_base = OTHER; note = 2'-deoxy-2'-fluorocytidine-3'-phosphate
  modified_base 4: mod_base = OTHER; note = 2'-O-methyladenosine-3'-phosphate
  modified_base 5: mod_base = OTHER; note = 2'-deoxy-2'-fluoroguanosine-3'-phosphate
  modified_base 6: mod_base = OTHER; note = 2'-O-methyluridine-3'-phosphate
  modified_base 7: mod_base = OTHER; note = 2'-deoxy-2'-fluoroguanosine-3'-phosphate
  modified_base 8: mod_base = OTHER; note = 2'-O-methyluridine-3'-phosphate
  modified_base 9: mod_base = OTHER; note = 2'-deoxy-2'-fluorouridine-3'-phosphate
  modified_base 10: mod_base = OTHER; note = 2'-O-methylcytidine-3'-phosphate
  modified_base 11: mod_base = OTHER; note = 2'-deoxy-2'-fluorouridine-3'-phosphate
  modified_base 12: mod_base = OTHER; note = 2'-O-methyluridine-3'-phosphate
  modified_base 13: mod_base = OTHER; note = 2'-deoxy-2'-fluoroguanosine-3'-phosphate
  modified_base 14: mod_base = OTHER; note = 2'-O-methylcytidine-3'-phosphate
  modified_base 15: mod_base = OTHER; note = 2'-deoxy-2'-fluorouridine-3'-phosphate
  modified_base 16: mod_base = OTHER; note = 2'-O-methylcytidine-3'-phosphate
  modified_base 17: mod_base = OTHER; note = 2'-deoxy-2'-fluorouridine-3'-phosphate
  modified_base 18: mod_base = OTHER; note = 2'-deoxy-2'-fluoroadenosine-3'-phosphate
  modified_base 19: mod_base = OTHER; note = 2'-deoxy-2'-fluorouridine-3'-phosphate
  modified_base 20: mod_base = OTHER; note = 2'-O-methyladenosine-3'-phosphorothioate
  modified_base 21: mod_base = OTHER; note = 2'-deoxy-2'-fluoroadenosine
aacagtgttcttgctctataa

SEQ ID NO: 332 - RNA, 21 nt, synthetic construct
  source 1..21: mol_type = other RNA
  modified_base 1: mod_base = OTHER; note = 2'-deoxy-2'-fluoroadenosine-3'-phosphate
  modified_base 2: mod_base = OTHER; note = 2'-O-methyladenosine-3'-phosphate
  modified_base 3: mod_base = OTHER; note = 2'-deoxy-2'-fluorocytidine-3'-phosphate
  modified_base 4: mod_base = OTHER; note = 2'-O-methyladenosine-3'-phosphate
  modified_base 5: mod_base = OTHER; note = 2'-deoxy-2'-fluoroguanosine-3'-phosphate
  modified_base 6: mod_base = OTHER; note = 2'-O-methyluridine-3'-phosphate
  modified_base 7: mod_base = OTHER; note = 2'-deoxy-2'-fluoroguanosine-3'-phosphate
  modified_base 8: mod_base = OTHER; note = 2'-O-methyluridine-3'-phosphate
  modified_base 9: mod_base = OTHER; note = 2'-O-methyluridine-3'-phosphate
  modified_base 10: mod_base = OTHER; note = 2'-O-methylcytidine-3'-phosphate
  modified_base 11: mod_base = OTHER; note = 2'-deoxy-2'-fluorouridine-3'-phosphate
  modified_base 12: mod_base = OTHER; note = 2'-O-methyluridine-3'-phosphate
  modified_base 13: mod_base = OTHER; note = 2'-deoxy-2'-fluoroguanosine-3'-phosphate
  modified_base 14: mod_base = OTHER; note = 2'-O-methylcytidine-3'-phosphate
  modified_base 15: mod_base = OTHER; note = 2'-deoxy-2'-fluorouridine-3'-phosphate
  modified_base 16: mod_base = OTHER; note = 2'-O-methylcytidine-3'-phosphate
  modified_base 17: mod_base = OTHER; note = 2'-deoxy-2'-fluorouridine-3'-phosphate
  modified_base 18: mod_base = OTHER; note = 2'-O-methyladenosine-3'-phosphate
  modified_base 19: mod_base = OTHER; note = 2'-deoxy-2'-fluorouridine-3'-phosphate
  modified_base 20: mod_base = OTHER; note = 2'-O-methyladenosine-3'-phosphorothioate
  modified_base 21: mod_base = OTHER; note = 2'-deoxy-2'-fluoroadenosine
aacagtgttcttgctctataa

SEQ ID NO: 333 - RNA, 21 nt, synthetic construct
  source 1..21: mol_type = other RNA
  modified_base 1: mod_base = OTHER; note = 2'-deoxy-2'-fluoroadenosine-3'-phosphate
  modified_base 2: mod_base = OTHER; note = 2'-deoxy-2'-fluoroadenosine-3'-phosphate
  modified_base 3: mod_base = OTHER; note = 2'-deoxy-2'-fluorocytidine-3'-phosphate
  modified_base 4: mod_base = OTHER; note = 2'-O-methyladenosine-3'-phosphate
  modified_base 5: mod_base = OTHER; note = 2'-deoxy-2'-fluoroguanosine-3'-phosphate
  modified_base 6: mod_base = OTHER; note = 2'-O-methyluridine-3'-phosphate
  modified_base 7: mod_base = OTHER; note = 2'-deoxy-2'-fluoroguanosine-3'-phosphate
  modified_base 8: mod_base = OTHER; note = 2'-O-methyluridine-3'-phosphate
  modified_base 9: mod_base = OTHER; note = 2'-deoxy-2'-fluorouridine-3'-phosphate
  modified_base 10: mod_base = OTHER; note = 2'-O-methylcytidine-3'-phosphate
  modified_base 11: mod_base = OTHER; note = 2'-deoxy-2'-fluorouridine-3'-phosphate
  modified_base 12: mod_base = OTHER; note = 2'-O-methyluridine-3'-phosphate
  modified_base 13: mod_base = OTHER; note = 2'-deoxy-2'-fluoroguanosine-3'-phosphate
  modified_base 14: mod_base = OTHER; note = 2'-O-methylcytidine-3'-phosphate
  modified_base 15: mod_base = OTHER; note = 2'-deoxy-2'-fluorouridine-3'-phosphate
  modified_base 16: mod_base = OTHER; note = 2'-O-methylcytidine-3'-phosphate
  modified_base 17: mod_base = OTHER; note = 2'-deoxy-2'-fluorouridine-3'-phosphate
  modified_base 18: mod_base = OTHER; note = 2'-O-methyladenosine-3'-phosphate
  modified_base 19: mod_base = OTHER; note = 2'-O-methyluridine-3'-phosphate
  modified_base 20: mod_base = OTHER; note = 2'-O-methyladenosine-3'-phosphorothioate
  modified_base 21: mod_base = OTHER; note = 2'-deoxy-2'-fluoroadenosine
aacagtgttcttgctctataa

SEQ ID NO: 334 - RNA, 21 nt, synthetic construct
  source 1..21: mol_type = other RNA
  modified_base 1: mod_base = OTHER; note = 2'-deoxy-2'-fluoroadenosine-3'-phosphate
  modified_base 2: mod_base = OTHER; note = 2'-O-methyladenosine-3'-phosphate
  modified_base 3: mod_base = OTHER; note = 2'-deoxy-2'-fluorocytidine-3'-phosphate
  modified_base 4: mod_base = OTHER; note = 2'-deoxy-2'-fluoroadenosine-3'-phosphate
  modified_base 5: mod_base = OTHER; note = 2'-deoxy-2'-fluoroguanosine-3'-phosphate
  modified_base 6: mod_base = OTHER; note = 2'-O-methyluridine-3'-phosphate
  modified_base 7: mod_base = OTHER; note = 2'-deoxy-2'-fluoroguanosine-3'-phosphate
  modified_base 8: mod_base = OTHER; note = 2'-O-methyluridine-3'-phosphate
  modified_base 9: mod_base = OTHER; note = 2'-deoxy-2'-fluorouridine-3'-phosphate
  modified_base 10: mod_base = OTHER; note = 2'-O-methylcytidine-3'-phosphate
  modified_base 11: mod_base = OTHER; note = 2'-deoxy-2'-fluorouridine-3'-phosphate
  modified_base 12: mod_base = OTHER; note = 2'-O-methyluridine-3'-phosphate
  modified_base 13: mod_base = OTHER; note = 2'-deoxy-2'-fluoroguanosine-3'-phosphate
  modified_base 14: mod_base = OTHER; note = 2'-O-methylcytidine-3'-phosphate
  modified_base 15: mod_base = OTHER; note = 2'-deoxy-2'-fluorouridine-3'-phosphate
  modified_base 16: mod_base = OTHER; note = 2'-O-methylcytidine-3'-phosphate
  modified_base 17: mod_base = OTHER; note = 2'-deoxy-2'-fluorouridine-3'-phosphate
  modified_base 18: mod_base = OTHER; note = 2'-O-methyladenosine-3'-phosphate
  modified_base 19: mod_base = OTHER; note = 2'-deoxy-2'-fluorouridine-3'-phosphate
  modified_base 20: mod_base = OTHER; note = 2'-O-methyladenosine-3'-phosphorothioate
  modified_base 21: mod_base = OTHER; note = 2'-deoxy-2'-fluoroadenosine
aacagtgttcttgctctataa

SEQ ID NO: 335 - RNA, 21 nt, synthetic construct
  source 1..21: mol_type = other RNA
  modified_base 1: mod_base = OTHER; note = 2'-deoxy-2'-fluoroadenosine-3'-phosphate
  modified_base 2: mod_base = OTHER; note = 2'-O-methyladenosine-3'-phosphate
  modified_base 3: mod_base = OTHER; note = 2'-deoxy-2'-fluorocytidine-3'-phosphate
  modified_base 4: mod_base = OTHER; note = 2'-O-methyladenosine-3'-phosphate
  modified_base 5: mod_base = OTHER; note = 2'-deoxy-2'-fluoroguanosine-3'-phosphate
  modified_base 6: mod_base = OTHER; note = 2'-O-methyluridine-3'-phosphate
  modified_base 7: mod_base = OTHER; note = 2'-deoxy-2'-fluoroguanosine-3'-phosphate
  modified_base 8: mod_base = OTHER; note = 2'-O-methyluridine-3'-phosphate
  modified_base 9: mod_base = OTHER; note = 2'-deoxy-2'-fluorouridine-3'-phosphate
  modified_base 10: mod_base = OTHER; note = 2'-O-methylcytidine-3'-phosphate
  modified_base 11: mod_base = OTHER; note = 2'-deoxy-2'-fluorouridine-3'-phosphate
  modified_base 12: mod_base = OTHER; note = 2'-O-methyluridine-3'-phosphate
  modified_base 13: mod_base = OTHER; note = 2'-deoxy-2'-fluoroguanosine-3'-phosphate
  modified_base 14: mod_base = OTHER; note = 2'-O-methylcytidine-3'-phosphate
  modified_base 15: mod_base = OTHER; note = 2'-deoxy-2'-fluorouridine-3'-phosphate
  modified_base 16: mod_base = OTHER; note = 2'-O-methylcytidine-3'-phosphate
  modified_base 17: mod_base = OTHER; note = 2'-deoxy-2'-fluorouridine-3'-phosphate
  modified_base 18: mod_base = OTHER; note = 2'-O-methyladenosine-3'-phosphate
  modified_base 19: mod_base = OTHER; note = 2'-deoxy-2'-fluorouridine-3'-phosphate
  modified_base 20: mod_base = OTHER; note = 2'-deoxy-2'-fluoroadenosine-3'-phosphorothioate
  modified_base 21: mod_base = OTHER; note = 2'-deoxy-2'-fluoroadenosine
aacagtgttcttgctctataa

SEQ ID NO: 336 - RNA, 21 nt, synthetic construct
  source 1..21: mol_type = other RNA
  modified_base 1: mod_base = OTHER; note = 2'-deoxy-2'-fluoroadenosine-3'-phosphate
  modified_base 2: mod_base = OTHER; note = 2'-O-methyladenosine-3'-phosphate
  modified_base 3: mod_base = OTHER; note = 2'-deoxy-2'-fluorocytidine-3'-phosphate
  modified_base 4: mod_base = OTHER; note = 2'-O-methyladenosine-3'-phosphate
  modified_base 5: mod_base = OTHER; note = 2'-deoxy-2'-fluoroguanosine-3'-phosphate
  modified_base 6: mod_base = OTHER; note = 2'-O-methyluridine-3'-phosphate
  modified_base 7: mod_base = OTHER; note = 2'-O-methylguanosine-3'-phosphate
  modified_base 8: mod_base = OTHER; note = 2'-O-methyluridine-3'-phosphate
  modified_base 9: mod_base = OTHER; note = 2'-deoxy-2'-fluorouridine-3'-phosphate
  modified_base 10: mod_base = OTHER; note = 2'-O-methylcytidine-3'-phosphate
  modified_base 11: mod_base = OTHER; note = 2'-deoxy-2'-fluorouridine-3'-phosphate
  modified_base 12: mod_base = OTHER; note = 2'-O-methyluridine-3'-phosphate
  modified_base 13: mod_base = OTHER; note = 2'-deoxy-2'-fluoroguanosine-3'-phosphate
  modified_base 14: mod_base = OTHER; note = 2'-O-methylcytidine-3'-phosphate
  modified_base 15: mod_base = OTHER; note = 2'-deoxy-2'-fluorouridine-3'-phosphate
  modified_base 16: mod_base = OTHER; note = 2'-O-methylcytidine-3'-phosphate
  modified_base 17: mod_base = OTHER; note = 2'-deoxy-2'-fluorouridine-3'-phosphate
  modified_base 18: mod_base = OTHER; note = 2'-O-methyladenosine-3'-phosphate
  modified_base 19: mod_base = OTHER; note = 2'-deoxy-2'-fluorouridine-3'-phosphate
  modified_base 20: mod_base = OTHER; note = 2'-O-methyladenosine-3'-phosphorothioate
  modified_base 21: mod_base = OTHER; note = 2'-deoxy-2'-fluoroadenosine
aacagtgttcttgctctataa

SEQ ID NO: 337 - RNA, 21 nt, synthetic construct
  source 1..21: mol_type = other RNA
  modified_base 1: mod_base = OTHER; note = 2'-deoxy-2'-fluoroadenosine-3'-phosphate
  modified_base 2: mod_base = OTHER; note = 2'-deoxy-2'-fluoroadenosine-3'-phosphate
  modified_base 3: mod_base = OTHER; note = 2'-deoxy-2'-fluorocytidine-3'-phosphate
  modified_base 4: mod_base = OTHER; note = 2'-O-methyladenosine-3'-phosphate
  modified_base 5: mod_base = OTHER; note = 2'-deoxy-2'-fluoroguanosine-3'-phosphate
  modified_base 6: mod_base = OTHER; note = 2'-O-methyluridine-3'-phosphate
  modified_base 7: mod_base = OTHER; note = 2'-deoxy-2'-fluoroguanosine-3'-phosphate
  modified_base 8: mod_base = OTHER; note = 2'-O-methyluridine-3'-phosphate
  modified_base 9: mod_base = OTHER; note = 2'-deoxy-2'-fluorouridine-3'-phosphate
  modified_base 10: mod_base = OTHER; note = 2'-O-methylcytidine-3'-phosphate
  modified_base 11: mod_base = OTHER; note = 2'-deoxy-2'-fluorouridine-3'-phosphate
  modified_base 12: mod_base = OTHER; note = 2'-O-methyluridine-3'-phosphate
  modified_base 13: mod_base = OTHER; note = 2'-deoxy-2'-fluoroguanosine-3'-phosphate
  modified_base 14: mod_base = OTHER; note = 2'-O-methylcytidine-3'-phosphate
  modified_base 15: mod_base = OTHER; note = 2'-deoxy-2'-fluorouridine-3'-phosphate
  modified_base 16: mod_base = OTHER; note = 2'-O-methylcytidine-3'-phosphate
  modified_base 17: mod_base = OTHER; note = 2'-O-methyluridine-3'-phosphate
  modified_base 18: mod_base = OTHER; note = 2'-O-methyladenosine-3'-phosphate
  modified_base 19: mod_base = OTHER; note = 2'-deoxy-2'-fluorouridine-3'-phosphate
  modified_base 20: mod_base = OTHER; note = 2'-O-methyladenosine-3'-phosphorothioate
  modified_base 21: mod_base = OTHER; note = 2'-deoxy-2'-fluoroadenosine
aacagtgttcttgctctataa

SEQ ID NO: 338 - RNA, 21 nt, synthetic construct
  source 1..21: mol_type = other RNA
  modified_base 1: mod_base = OTHER; note = 2'-deoxy-2'-fluoroadenosine-3'-phosphate
  modified_base 2: mod_base = OTHER; note = 2'-O-methyladenosine-3'-phosphate
  modified_base 3: mod_base = OTHER; note = 2'-deoxy-2'-fluorocytidine-3'-phosphate
  modified_base 4: mod_base = OTHER; note = 2'-O-methyladenosine-3'-phosphate
  modified_base 5: mod_base = OTHER; note = 2'-deoxy-2'-fluoroguanosine-3'-phosphate
  modified_base 6: mod_base = OTHER; note = 2'-deoxy-2'-fluorouridine-3'-phosphate
  modified_base 7: mod_base = OTHER; note = 2'-deoxy-2'-fluoroguanosine-3'-phosphate
  modified_base 8: mod_base = OTHER; note = 2'-O-methyluridine-3'-phosphate
  modified_base 9: mod_base = OTHER; note = 2'-deoxy-2'-fluorouridine-3'-phosphate
  modified_base 10: mod_base = OTHER; note = 2'-O-methylcytidine-3'-phosphate
  modified_base 11: mod_base = OTHER; note = 2'-deoxy-2'-fluorouridine-3'-phosphate
  modified_base 12: mod_base = OTHER; note = 2'-O-methyluridine-3'-phosphate
  modified_base 13: mod_base = OTHER; note = 2'-deoxy-2'-fluoroguanosine-3'-phosphate
  modified_base 14: mod_base = OTHER; note = 2'-O-methylcytidine-3'-phosphate
  modified_base 15: mod_base = OTHER; note = 2'-deoxy-2'-fluorouridine-3'-phosphate
  modified_base 16: mod_base = OTHER; note = 2'-O-methylcytidine-3'-phosphate
  modified_base 17: mod_base = OTHER; note = 2'-deoxy-2'-fluorouridine-3'-phosphate
  modified_base 18: mod_base = OTHER; note = 2'-O-methyladenosine-3'-phosphate
  modified_base 19: mod_base = OTHER; note = 2'-deoxy-2'-fluorouridine-3'-phosphate
  modified_base 20: mod_base = OTHER; note = 2'-O-methyladenosine-3'-phosphorothioate
  modified_base 21: mod_base = OTHER; note = 2'-deoxy-2'-fluoroadenosine
aacagtgttcttgctctataa

SEQ ID NO: 339 - RNA, 21 nt, synthetic construct
  source 1..21: mol_type = other RNA
  modified_base 1: mod_base = OTHER; note = 2'-deoxy-2'-fluoroadenosine-3'-phosphate
  modified_base 2: mod_base = OTHER; note = 2'-O-methyladenosine-3'-phosphate
  modified_base 3: mod_base = OTHER; note = 2'-deoxy-2'-fluorocytidine-3'-phosphate
  modified_base 4: mod_base = OTHER; note = 2'-O-methyladenosine-3'-phosphate
  modified_base 5: mod_base = OTHER; note = 2'-O-methylguanosine-3'-phosphate
  modified_base 6: mod_base = OTHER; note = 2'-O-methyluridine-3'-phosphate
  modified_base 7: mod_base = OTHER; note = 2'-deoxy-2'-fluoroguanosine-3'-phosphate
  modified_base 8: mod_base = OTHER; note = 2'-O-methyluridine-3'-phosphate
  modified_base 9: mod_base = OTHER; note = 2'-deoxy-2'-fluorouridine-3'-phosphate
  modified_base 10: mod_base = OTHER; note = 2'-O-methylcytidine-3'-phosphate
  modified_base 11: mod_base = OTHER; note = 2'-deoxy-2'-fluorouridine-3'-phosphate
  modified_base 12: mod_base = OTHER; note = 2'-O-methyluridine-3'-phosphate
  modified_base 13: mod_base = OTHER; note = 2'-deoxy-2'-fluoroguanosine-3'-phosphate
  modified_base 14: mod_base = OTHER; note = 2'-O-methylcytidine-3'-phosphate
  modified_base 15: mod_base = OTHER; note = 2'-deoxy-2'-fluorouridine-3'-phosphate
  modified_base 16: mod_base = OTHER; note = 2'-O-methylcytidine-3'-phosphate
  modified_base 17: mod_base = OTHER; note = 2'-deoxy-2'-fluorouridine-3'-phosphate
  modified_base 18: mod_base = OTHER; note = 2'-O-methyladenosine-3'-phosphate
  modified_base 19: mod_base = OTHER; note = 2'-deoxy-2'-fluorouridine-3'-phosphate
  modified_base 20: mod_base = OTHER; note = 2'-O-methyladenosine-3'-phosphorothioate
  modified_base 21: mod_base = OTHER; note = 2'-deoxy-2'-fluoroadenosine
aacagtgttcttgctctataa

SEQ ID NO: 340 - RNA, 21 nt, synthetic construct
  source 1..21: mol_type = other RNA
  modified_base 1: mod_base = OTHER; note = 2'-deoxy-2'-fluoroadenosine-3'-phosphate
  modified_base 2: mod_base = OTHER; note = 2'-O-methyladenosine-3'-phosphate
  modified_base 3: mod_base = OTHER; note = 2'-deoxy-2'-fluorocytidine-3'-phosphate
  modified_base 4: mod_base = OTHER; note = 2'-O-methyladenosine-3'-phosphate
  modified_base 5: mod_base = OTHER; note = 2'-deoxy-2'-fluoroguanosine-3'-phosphate
  modified_base 6: mod_base = OTHER; note = 2'-O-methyluridine-3'-phosphate
  modified_base 7: mod_base = OTHER; note = 2'-deoxy-2'-fluoroguanosine-3'-phosphate
  modified_base 8: mod_base = OTHER; note = 2'-O-methyluridine-3'-phosphate
  modified_base 9: mod_base = OTHER; note = 2'-deoxy-2'-fluorouridine-3'-phosphate
  modified_base 10: mod_base = OTHER; note = 2'-O-methylcytidine-3'-phosphate
  modified_base 11: mod_base = OTHER; note = 2'-O-methyluridine-3'-phosphate
  modified_base 12: mod_base = OTHER; note = 2'-O-methyluridine-3'-phosphate
  modified_base 13: mod_base = OTHER; note = 2'-deoxy-2'-fluoroguanosine-3'-phosphate
  modified_base 14: mod_base = OTHER; note = 2'-O-methylcytidine-3'-phosphate
  modified_base 15: mod_base = OTHER; note = 2'-deoxy-2'-fluorouridine-3'-phosphate
  modified_base 16: mod_base = OTHER; note = 2'-O-methylcytidine-3'-phosphate
  modified_base 17: mod_base = OTHER; note = 2'-deoxy-2'-fluorouridine-3'-phosphate
  modified_base 18: mod_base = OTHER; note = 2'-O-methyladenosine-3'-phosphate
  modified_base 19: mod_base = OTHER; note = 2'-deoxy-2'-fluorouridine-3'-phosphate
  modified_base 20: mod_base = OTHER; note = 2'-O-methyladenosine-3'-phosphorothioate
  modified_base 21: mod_base = OTHER; note = 2'-deoxy-2'-fluoroadenosine
aacagtgttcttgctctataa

SEQ ID NO: 341 - RNA, 21 nt, synthetic construct
  source 1..21: mol_type = other RNA
  modified_base 1: mod_base = OTHER; note = 2'-deoxy-2'-fluoroadenosine-3'-phosphate
  modified_base 2: mod_base = OTHER; note = 2'-O-methyladenosine-3'-phosphate
  modified_base 3: mod_base = OTHER; note = 2'-deoxy-2'-fluorocytidine-3'-phosphate
  modified_base 4: mod_base = OTHER; note = 2'-O-methyladenosine-3'-phosphate
  modified_base 5: mod_base = OTHER; note = 2'-deoxy-2'-fluoroguanosine-3'-phosphate
  modified_base 6: mod_base = OTHER; note = 2'-O-methyluridine-3'-phosphate
  modified_base 7: mod_base = OTHER; note = 2'-deoxy-2'-fluoroguanosine-3'-phosphate
  modified_base 8: mod_base = OTHER; note = 2'-deoxy-2'-fluorouridine-3'-phosphate
  modified_base 9: mod_base = OTHER; note = 2'-deoxy-2'-fluorouridine-3'-phosphate
  modified_base 10: mod_base = OTHER; note = 2'-O-methylcytidine-3'-phosphate
  modified_base 11: mod_base = OTHER; note = 2'-deoxy-2'-fluorouridine-3'-phosphate
  modified_base 12: mod_base = OTHER; note = 2'-O-methyluridine-3'-phosphate
  modified_base 13: mod_base = OTHER; note = 2'-deoxy-2'-fluoroguanosine-3'-phosphate
  modified_base 14: mod_base = OTHER; note = 2'-O-methylcytidine-3'-phosphate
  modified_base 15: mod_base = OTHER; note = 2'-deoxy-2'-fluorouridine-3'-phosphate
  modified_base 16: mod_base = OTHER; note = 2'-O-methylcytidine-3'-phosphate
  modified_base 17: mod_base = OTHER; note = 2'-deoxy-2'-fluorouridine-3'-phosphate
  modified_base 18: mod_base = OTHER; note = 2'-O-methyladenosine-3'-phosphate
  modified_base 19: mod_base = OTHER; note = 2'-deoxy-2'-fluorouridine-3'-phosphate
  modified_base 20: mod_base = OTHER; note = 2'-O-methyladenosine-3'-phosphorothioate
  modified_base 21: mod_base = OTHER; note = 2'-deoxy-2'-fluoroadenosine
aacagtgttcttgctctataa

SEQ ID NO: 342 - RNA, 21 nt, synthetic construct
  source 1..21: mol_type = other RNA
  modified_base 1: mod_base = OTHER; note = 2'-deoxy-2'-fluoroadenosine-3'-phosphate
  modified_base 2: mod_base = OTHER; note = 2'-O-methyladenosine-3'-phosphate
  modified_base 3: mod_base = OTHER; note = 2'-deoxy-2'-fluorocytidine-3'-phosphate
  modified_base 4: mod_base = OTHER; note = 2'-O-methyladenosine-3'-phosphate
  modified_base 5: mod_base = OTHER; note = 2'-deoxy-2'-fluoroguanosine-3'-phosphate
  modified_base 6: mod_base = OTHER; note = 2'-O-methyluridine-3'-phosphate
  modified_base 7: mod_base = OTHER; note = 2'-deoxy-2'-fluoroguanosine-3'-phosphate
  modified_base 8: mod_base = OTHER; note = 2'-O-methyluridine-3'-phosphate
  modified_base 9: mod_base = OTHER; note = 2'-deoxy-2'-fluorouridine-3'-phosphate
  modified_base 10: mod_base = OTHER; note = 2'-O-methylcytidine-3'-phosphate
  modified_base 11: mod_base = OTHER; note = 2'-deoxy-2'-fluorouridine-3'-phosphate
  modified_base 12: mod_base = OTHER; note = 2'-O-methyluridine-3'-phosphate
  modified_base 13: mod_base = OTHER; note = 2'-deoxy-2'-fluoroguanosine-3'-phosphate
  modified_base 14: mod_base = OTHER; note = 2'-O-methylcytidine-3'-phosphate
  modified_base 15: mod_base = OTHER; note = 2'-deoxy-2'-fluorouridine-3'-phosphate
  modified_base 16: mod_base = OTHER; note = 2'-O-methylcytidine-3'-phosphate
  modified_base 17: mod_base = OTHER; note = 2'-deoxy-2'-fluorouridine-3'-phosphate
  modified_base 18: mod_base = OTHER; note = 2'-O-methyladenosine-3'-phosphate
  modified_base 19: mod_base = OTHER; note = 2'-O-methyluridine-3'-phosphate
  modified_base 20: mod_base = OTHER; note = 2'-O-methyladenosine-3'-phosphorothioate
  modified_base 21: mod_base = OTHER; note = 2'-deoxy-2'-fluoroadenosine
aacagtgttcttgctctataa

SEQ ID NO: 343 - RNA, 21 nt, synthetic construct
  source 1..21: mol_type = other RNA
  modified_base 1: mod_base = OTHER; note = 2'-deoxy-2'-fluoroadenosine-3'-phosphate
  modified_base 2: mod_base = OTHER; note = 2'-deoxy-2'-fluoroadenosine-3'-phosphate
  modified_base 3: mod_base = OTHER; note = 2'-deoxy-2'-fluorocytidine-3'-phosphate
  modified_base 4: mod_base = OTHER; note = 2'-O-methyladenosine-3'-phosphate
  modified_base 5: mod_base = OTHER; note = 2'-deoxy-2'-fluoroguanosine-3'-phosphate
  modified_base 6: mod_base = OTHER; note = 2'-O-methyluridine-3'-phosphate
  modified_base 7: mod_base = OTHER; note = 2'-deoxy-2'-fluoroguanosine-3'-phosphate
  modified_base 8: mod_base = OTHER; note = 2'-O-methyluridine-3'-phosphate
  modified_base 9: mod_base = OTHER; note = 2'-deoxy-2'-fluorouridine-3'-phosphate
  modified_base 10: mod_base = OTHER; note = 2'-O-methylcytidine-3'-phosphate
  modified_base 11: mod_base = OTHER; note = 2'-deoxy-2'-fluorouridine-3'-phosphate
  modified_base 12: mod_base = OTHER; note = 2'-O-methyluridine-3'-phosphate
  modified_base 13: mod_base = OTHER; note = 2'-O-methylguanosine-3'-phosphate
  modified_base 14: mod_base = OTHER; note = 2'-O-methylcytidine-3'-phosphate
  modified_base 15: mod_base = OTHER; note = 2'-deoxy-2'-fluorouridine-3'-phosphate
  modified_base 16: mod_base = OTHER; note = 2'-O-methylcytidine-3'-phosphate
  modified_base 17: mod_base = OTHER; note = 2'-deoxy-2'-fluorouridine-3'-phosphate
  modified_base 18: mod_base = OTHER; note = 2'-O-methyladenosine-3'-phosphate
  modified_base 19: mod_base = OTHER; note = 2'-deoxy-2'-fluorouridine-3'-phosphate
  modified_base 20: mod_base = OTHER; note = 2'-O-methyladenosine-3'-phosphorothioate
  modified_base 21: mod_base = OTHER; note = 2'-deoxy-2'-fluoroadenosine
aacagtgttcttgctctataa

SEQ ID NO: 344 - RNA, 21 nt, synthetic construct
  source 1..21: mol_type = other RNA
  modified_base 1: mod_base = OTHER; note = 2'-deoxy-2'-fluoroadenosine-3'-phosphate
  modified_base 2: mod_base = OTHER; note = 2'-O-methyladenosine-3'-phosphate
  modified_base 3: mod_base = OTHER; note = 2'-deoxy-2'-fluorocytidine-3'-phosphate
  modified_base 4: mod_base = OTHER; note = 2'-O-methyladenosine-3'-phosphate
  modified_base 5: mod_base = OTHER; note = 2'-deoxy-2'-fluoroguanosine-3'-phosphate
  modified_base 6: mod_base = OTHER; note = 2'-O-methyluridine-3'-phosphate
  modified_base 7: mod_base = OTHER; note = 2'-deoxy-2'-fluoroguanosine-3'-phosphate
  modified_base 8: mod_base = OTHER; note = 2'-O-methyluridine-3'-phosphate
  modified_base 9: mod_base = OTHER; note = 2'-deoxy-2'-fluorouridine-3'-phosphate
  modified_base 10: mod_base = OTHER; note = 2'-deoxy-2'-fluorocytidine-3'-phosphate
  modified_base 11: mod_base = OTHER; note = 2'-deoxy-2'-fluorouridine-3'-phosphate
  modified_base 12: mod_base = OTHER; note = 2'-O-methyluridine-3'-phosphate
  modified_base 13: mod_base = OTHER; note = 2'-deoxy-2'-fluoroguanosine-3'-phosphate
  modified_base 14: mod_base = OTHER; note = 2'-O-methylcytidine-3'-phosphate
  modified_base 15: mod_base = OTHER; note = 2'-deoxy-2'-fluorouridine-3'-phosphate
  modified_base 16: mod_base = OTHER; note = 2'-O-methylcytidine-3'-phosphate
  modified_base 17: mod_base = OTHER; note = 2'-deoxy-2'-fluorouridine-3'-phosphate
  modified_base 18: mod_base = OTHER; note = 2'-O-methyladenosine-3'-phosphate
  modified_base 19: mod_base = OTHER; note = 2'-deoxy-2'-fluorouridine-3'-phosphate
  modified_base 20: mod_base = OTHER; note = 2'-O-methyladenosine-3'-phosphorothioate
  modified_base 21: mod_base = OTHER; note = 2'-deoxy-2'-fluoroadenosine
aacagtgttcttgctctataa

SEQ ID NO: 345 - RNA, 21 nt, synthetic construct
  source 1..21: mol_type = other RNA
  modified_base 1: mod_base = OTHER; note = 2'-deoxy-2'-fluoroadenosine-3'-phosphate
  modified_base 2: mod_base = OTHER; note = 2'-O-methyladenosine-3'-phosphate
  modified_base 3: mod_base = OTHER; note = 2'-deoxy-2'-fluorocytidine-3'-phosphate
  modified_base 4: mod_base = OTHER; note = 2'-O-methyladenosine-3'-phosphate
  modified_base 5: mod_base = OTHER; note = 2'-deoxy-2'-fluoroguanosine-3'-phosphate
  modified_base 6: mod_base = OTHER; note = 2'-O-methyluridine-3'-phosphate
  modified_base 7: mod_base = OTHER; note = 2'-deoxy-2'-fluoroguanosine-3'-phosphate
  modified_base 8: mod_base = OTHER; note = 2'-O-methyluridine-3'-phosphate
  modified_base 9: mod_base = OTHER; note = 2'-deoxy-2'-fluorouridine-3'-phosphate
  modified_base 10: mod_base = OTHER; note = 2'-O-methylcytidine-3'-phosphate
  modified_base 11: mod_base = OTHER; note = 2'-deoxy-2'-fluorouridine-3'-phosphate
  modified_base 12: mod_base = OTHER; note = 2'-O-methyluridine-3'-phosphate
  modified_base 13: mod_base = OTHER; note = 2'-deoxy-2'-fluoroguanosine-3'-phosphate
  modified_base 14: mod_base = OTHER; note = 2'-O-methylcytidine-3'-phosphate
  modified_base 15: mod_base = OTHER; note = 2'-deoxy-2'-fluorouridine-3'-phosphate
  modified_base 16: mod_base = OTHER; note = 2'-O-methylcytidine-3'-phosphate
  modified_base 17: mod_base = OTHER; note = 2'-O-methyluridine-3'-phosphate
  modified_base 18: mod_base = OTHER; note = 2'-O-methyladenosine-3'-phosphate
  modified_base 19: mod_base = OTHER; note = 2'-deoxy-2'-fluorouridine-3'-phosphate
  modified_base 20: mod_base = OTHER; note = 2'-O-methyladenosine-3'-phosphorothioate
  modified_base 21: mod_base = OTHER; note = 2'-deoxy-2'-fluoroadenosine
aacagtgttcttgctctataa

SEQ ID NO: 346 - RNA, 21 nt, synthetic construct
  source 1..21: mol_type = other RNA
  modified_base 1: mod_base = OTHER; note = 2'-deoxy-2'-fluoroadenosine-3'-phosphate
  modified_base 2: mod_base = OTHER; note = 2'-O-methyladenosine-3'-phosphate
  modified_base 3: mod_base = OTHER; note = 2'-deoxy-2'-fluorocytidine-3'-phosphate
  modified_base 4: mod_base = OTHER; note = 2'-O-methyladenosine-3'-phosphate
  modified_base 5: mod_base = OTHER; note = 2'-deoxy-2'-fluoroguanosine-3'-phosphate
  modified_base 6: mod_base = OTHER; note = 2'-O-methyluridine-3'-phosphate
  modified_base 7: mod_base = OTHER; note = 2'-O-methylguanosine-3'-phosphate
  modified_base 8: mod_base = OTHER; note = 2'-O-methyluridine-3'-phosphate
  modified_base 9: mod_base = OTHER; note = 2'-deoxy-2'-fluorouridine-3'-phosphate
  modified_base 10: mod_base = OTHER; note = 2'-O-methylcytidine-3'-phosphate
  modified_base 11: mod_base = OTHER; note = 2'-deoxy-2'-fluorouridine-3'-phosphate
  modified_base 12: mod_base = OTHER; note = 2'-O-methyluridine-3'-phosphate
  modified_base 13: mod_base = OTHER; note = 2'-deoxy-2'-fluoroguanosine-3'-phosphate
  modified_base 14: mod_base = OTHER; note = 2'-O-methylcytidine-3'-phosphate
  modified_base 15: mod_base = OTHER; note = 2'-deoxy-2'-fluorouridine-3'-phosphate
  modified_base 16: mod_base = OTHER; note = 2'-O-methylcytidine-3'-phosphate
  modified_base 17: mod_base = OTHER; note = 2'-deoxy-2'-fluorouridine-3'-phosphate
  modified_base 18: mod_base = OTHER; note = 2'-O-methyladenosine-3'-phosphate
  modified_base 19: mod_base = OTHER; note = 2'-deoxy-2'-fluorouridine-3'-phosphate
  modified_base 20: mod_base = OTHER; note = 2'-O-methyladenosine-3'-phosphorothioate
  modified_base 21: mod_base = OTHER; note = 2'-deoxy-2'-fluoroadenosine
aacagtgttcttgctctataa

SEQ ID NO: 347 - RNA, 21 nt, synthetic construct
  source 1..21: mol_type = other RNA
  modified_base 1: mod_base = OTHER; note = 2'-deoxy-2'-fluoroadenosine-3'-phosphate
  modified_base 2: mod_base = OTHER; note = 2'-deoxy-2'-fluoroadenosine-3'-phosphate
  modified_base 3: mod_base = OTHER; note = 2'-deoxy-2'-fluorocytidine-3'-phosphate
  modified_base 4: mod_base = OTHER; note = 2'-O-methyladenosine-3'-phosphate
  modified_base 5: mod_base = OTHER; note = 2'-deoxy-2'-fluoroguanosine-3'-phosphate
  modified_base 6: mod_base = OTHER; note = 2'-O-methyluridine-3'-phosphate
  modified_base 7: mod_base = OTHER; note = 2'-deoxy-2'-fluoroguanosine-3'-phosphate
  modified_base 8: mod_base = OTHER; note = 2'-O-methyluridine-3'-phosphate
  modified_base 9: mod_base = OTHER; note = 2'-deoxy-2'-fluorouridine-3'-phosphate
  modified_base 10: mod_base = OTHER; note = 2'-O-methylcytidine-3'-phosphate
  modified_base 11: mod_base = OTHER; note = 2'-O-methyluridine-3'-phosphate
  modified_base 12: mod_base = OTHER; note = 2'-O-methyluridine-3'-phosphate
  modified_base 13: mod_base = OTHER; note = 2'-deoxy-2'-fluoroguanosine-3'-phosphate
  modified_base 14: mod_base = OTHER; note = 2'-O-methylcytidine-3'-phosphate
  modified_base 15: mod_base = OTHER; note = 2'-deoxy-2'-fluorouridine-3'-phosphate
  modified_base 16: mod_base = OTHER; note = 2'-O-methylcytidine-3'-phosphate
  modified_base 17: mod_base = OTHER; note = 2'-deoxy-2'-fluorouridine-3'-phosphate
  modified_base 18: mod_base = OTHER; note = 2'-O-methyladenosine-3'-phosphate
  modified_base 19: mod_base = OTHER; note = 2'-deoxy-2'-fluorouridine-3'-phosphate
  modified_base 20: mod_base = OTHER; note = 2'-O-methyladenosine-3'-phosphorothioate
  modified_base 21: mod_base = OTHER; note = 2'-deoxy-2'-fluoroadenosine
aacagtgttcttgctctataa

SEQ ID NO: 348 - RNA, 21 nt, synthetic construct
  source 1..21: mol_type = other RNA
  modified_base 1: mod_base = OTHER; note = 2'-deoxy-2'-fluoroadenosine-3'-phosphate
  modified_base 2: mod_base = OTHER; note = 2'-O-methyladenosine-3'-phosphate
  modified_base 3: mod_base = OTHER; note = 2'-O-methylcytidine-3'-phosphate
  modified_base 4: mod_base = OTHER; note = 2'-O-methyladenosine-3'-phosphate
  modified_base 5: mod_base = OTHER; note = 2'-deoxy-2'-fluoroguanosine-3'-phosphate
  modified_base 6: mod_base = OTHER; note = 2'-O-methyluridine-3'-phosphate
  modified_base 7: mod_base = OTHER; note = 2'-deoxy-2'-fluoroguanosine-3'-phosphate
  modified_base 8: mod_base = OTHER; note = 2'-deoxy-2'-fluorouridine-3'-phosphate
  modified_base 9: mod_base = OTHER; note = 2'-deoxy-2'-fluorouridine-3'-phosphate
  modified_base 10: mod_base = OTHER; note = 2'-O-methylcytidine-3'-phosphate
  modified_base 11: mod_base = OTHER; note = 2'-deoxy-2'-fluorouridine-3'-phosphate
  modified_base 12: mod_base = OTHER; note = 2'-O-methyluridine-3'-phosphate
  modified_base 13: mod_base = OTHER; note = 2'-deoxy-2'-fluoroguanosine-3'-phosphate
  modified_base 14: mod_base = OTHER; note = 2'-O-methylcytidine-3'-phosphate
  modified_base 15: mod_base = OTHER; note = 2'-deoxy-2'-fluorouridine-3'-phosphate
  modified_base 16: mod_base = OTHER; note = 2'-O-methylcytidine-3'-phosphate
  modified_base 17: mod_base = OTHER; note = 2'-deoxy-2'-fluorouridine-3'-phosphate
  modified_base 18: mod_base = OTHER; note = 2'-O-methyladenosine-3'-phosphate
  modified_base 19: mod_base = OTHER; note = 2'-deoxy-2'-fluorouridine-3'-phosphate
  modified_base 20: mod_base = OTHER; note = 2'-O-methyladenosine-3'-phosphorothioate
  modified_base 21: mod_base = OTHER; note = 2'-deoxy-2'-fluoroadenosine
aacagtgttcttgctctataa

SEQ ID NO: 349 - RNA, 21 nt, synthetic construct
  source 1..21: mol_type = other RNA
  modified_base 1: mod_base = OTHER; note = 2'-deoxy-2'-fluoroadenosine-3'-phosphate
  modified_base 2: mod_base = OTHER; note = 2'-O-methyladenosine-3'-phosphate
  modified_base 3: mod_base = OTHER; note = 2'-deoxy-2'-fluorocytidine-3'-phosphate
  modified_base 4: mod_base = OTHER; note = 2'-O-methyladenosine-3'-phosphate
  modified_base 5: mod_base = OTHER; note = 2'-deoxy-2'-fluoroguanosine-3'-phosphate
  modified_base 6: mod_base = OTHER; note = 2'-O-methyluridine-3'-phosphate
  modified_base 7: mod_base = OTHER; note = 2'-deoxy-2'-fluoroguanosine-3'-phosphate
  modified_base 8: mod_base = OTHER; note = 2'-O-methyluridine-3'-phosphate
  modified_base 9: mod_base = OTHER; note = 2'-O-methyluridine-3'-phosphate
  modified_base 10: mod_base = OTHER; note = 2'-O-methylcytidine-3'-phosphate
  modified_base 11: mod_base = OTHER; note = 2'-deoxy-2'-fluorouridine-3'-phosphate
  modified_base 12: mod_base = OTHER; note = 2'-deoxy-2'-fluorouridine-3'-phosphate
  modified_base 13: mod_base = OTHER; note = 2'-deoxy-2'-fluoroguanosine-3'-phosphate
  modified_base 14: mod_base = OTHER; note = 2'-O-methylcytidine-3'-phosphate
  modified_base 15: mod_base = OTHER; note = 2'-deoxy-2'-fluorouridine-3'-phosphate
  modified_base 16: mod_base = OTHER; note = 2'-O-methylcytidine-3'-phosphate
  modified_base 17: mod_base = OTHER; note = 2'-deoxy-2'-fluorouridine-3'-phosphate
  modified_base 18: mod_base = OTHER; note = 2'-O-methyladenosine-3'-phosphate
  modified_base 19: mod_base = OTHER; note = 2'-deoxy-2'-fluorouridine-3'-phosphate
  modified_base 20: mod_base = OTHER; note = 2'-O-methyladenosine-3'-phosphorothioate
  modified_base 21: mod_base = OTHER; note = 2'-deoxy-2'-fluoroadenosine
aacagtgttcttgctctataa

SEQ ID NO: 350 - RNA, 21 nt, synthetic construct
  source 1..21: mol_type = other RNA
  modified_base 1: mod_base = OTHER; note = 2'-deoxy-2'-fluoroadenosine-3'-phosphate
  modified_base 2: mod_base = OTHER; note = 2'-O-methyladenosine-3'-phosphate
  modified_base 3: mod_base = OTHER; note = 2'-deoxy-2'-fluorocytidine-3'-phosphate
  modified_base 4: mod_base = OTHER; note = 2'-deoxy-2'-fluoroadenosine-3'-phosphate
  modified_base 5: mod_base = OTHER; note = 2'-deoxy-2'-fluoroguanosine-3'-phosphate
  modified_base 6: mod_base = OTHER; note = 2'-O-methyluridine-3'-phosphate
  modified_base 7: mod_base = OTHER; note = 2'-deoxy-2'-fluoroguanosine-3'-phosphate
  modified_base 8: mod_base = OTHER; note = 2'-O-methyluridine-3'-phosphate
  modified_base 9: mod_base = OTHER; note = 2'-deoxy-2'-fluorouridine-3'-phosphate
  modified_base 10: mod_base = OTHER; note = 2'-O-methylcytidine-3'-phosphate
  modified_base 11: mod_base = OTHER; note = 2'-O-methyluridine-3'-phosphate
  modified_base 12: mod_base = OTHER; note = 2'-O-methyluridine-3'-phosphate
  modified_base 13: mod_base = OTHER; note = 2'-deoxy-2'-fluoroguanosine-3'-phosphate
  modified_base 14: mod_base = OTHER; note = 2'-O-methylcytidine-3'-phosphate
  modified_base 15: mod_base = OTHER; note = 2'-deoxy-2'-fluorouridine-3'-phosphate
  modified_base 16: mod_base = OTHER; note = 2'-O-methylcytidine-3'-phosphate
  modified_base 17: mod_base = OTHER; note = 2'-deoxy-2'-fluorouridine-3'-phosphate
  modified_base 18: mod_base = OTHER; note = 2'-O-methyladenosine-3'-phosphate
  modified_base 19: mod_base = OTHER; note = 2'-deoxy-2'-fluorouridine-3'-phosphate
  modified_base 20: mod_base = OTHER; note = 2'-O-methyladenosine-3'-phosphorothioate
  modified_base 21: mod_base = OTHER; note = 2'-deoxy-2'-fluoroadenosine
aacagtgttcttgctctataa

SEQ ID NO: 351 - RNA, 21 nt, synthetic construct
  source 1..21: mol_type = other RNA
  modified_base 1: mod_base = OTHER; note = 2'-deoxy-2'-fluoroadenosine-3'-phosphate
  modified_base 2: mod_base = OTHER; note = 2'-O-methyladenosine-3'-phosphate
  modified_base 3: mod_base = OTHER; note = 2'-deoxy-2'-fluorocytidine-3'-phosphate
  modified_base 4: mod_base = OTHER; note = 2'-O-methyladenosine-3'-phosphate
  modified_base 5: mod_base = OTHER; note = 2'-deoxy-2'-fluoroguanosine-3'-phosphate
  modified_base 6: mod_base = OTHER; note = 2'-O-methyluridine-3'-phosphate
  modified_base 7: mod_base = OTHER; note = 2'-deoxy-2'-fluoroguanosine-3'-phosphate
  modified_base 8: mod_base = OTHER; note = 2'-deoxy-2'-fluorouridine-3'-phosphate
  modified_base 9: mod_base = OTHER; note = 2'-deoxy-2'-fluorouridine-3'-phosphate
  modified_base 10: mod_base = OTHER; note = 2'-O-methylcytidine-3'-phosphate
  modified_base 11: mod_base = OTHER; note = 2'-deoxy-2'-fluorouridine-3'-phosphate
  modified_base 12: mod_base = OTHER; note = 2'-O-methyluridine-3'-phosphate
  modified_base 13: mod_base = OTHER; note = 2'-deoxy-2'-fluoroguanosine-3'-phosphate
  modified_base 14: mod_base = OTHER; note = 2'-O-methylcytidine-3'-phosphate
  modified_base 15: mod_base = OTHER; note = 2'-deoxy-2'-fluorouridine-3'-phosphate
  modified_base 16: mod_base = OTHER; note = 2'-O-methylcytidine-3'-phosphate
  modified_base 17: mod_base = OTHER; note = 2'-deoxy-2'-fluorouridine-3'-phosphate
  modified_base 18: mod_base = OTHER; note = 2'-O-methyladenosine-3'-phosphate
  modified_base 19: mod_base = OTHER; note = 2'-O-methyluridine-3'-phosphate
  modified_base 20: mod_base = OTHER; note = 2'-O-methyladenosine-3'-phosphorothioate
  modified_base 21: mod_base = OTHER; note = 2'-deoxy-2'-fluoroadenosine
aacagtgttcttgctctataa

SEQ ID NO: 352 - RNA, 21 nt, synthetic construct
  source 1..21: mol_type = other RNA
  modified_base 1: mod_base = OTHER; note = 2'-deoxy-2'-fluoroadenosine-3'-phosphate
  modified_base 2: mod_base = OTHER; note = 2'-O-methyladenosine-3'-phosphate
  modified_base 3: mod_base = OTHER; note = 2'-deoxy-2'-fluorocytidine-3'-phosphate
  modified_base 4: mod_base = OTHER; note = 2'-O-methyladenosine-3'-phosphate
  modified_base 5: mod_base = OTHER; note = 2'-deoxy-2'-fluoroguanosine-3'-phosphate
  modified_base 6: mod_base = OTHER; note = 2'-O-methyluridine-3'-phosphate
  modified_base 7: mod_base = OTHER; note = 2'-deoxy-2'-fluoroguanosine-3'-phosphate
  modified_base 8: mod_base = OTHER; note = 2'-deoxy-2'-fluorouridine-3'-phosphate
  modified_base 9: mod_base = OTHER; note = 2'-deoxy-2'-fluorouridine-3'-phosphate
  modified_base 10: mod_base = OTHER; note = 2'-O-methylcytidine-3'-phosphate
  modified_base 11: mod_base = OTHER; note = 2'-deoxy-2'-fluorouridine-3'-phosphate
  modified_base 12: mod_base = OTHER; note = 2'-O-methyluridine-3'-phosphate
  modified_base 13: mod_base = OTHER; note = 2'-deoxy-2'-fluoroguanosine-3'-phosphate
  modified_base 14: mod_base = OTHER; note = 2'-O-methylcytidine-3'-phosphate
  modified_base 15: mod_base = OTHER; note = 2'-deoxy-2'-fluorouridine-3'-phosphate
  modified_base 16: mod_base = OTHER; note = 2'-O-methylcytidine-3'-phosphate
  modified_base 17: mod_base = OTHER; note = 2'-deoxy-2'-fluorouridine-3'-phosphate
  modified_base 18: mod_base = OTHER; note = 2'-O-methyladenosine-3'-phosphate
  modified_base 19: mod_base = OTHER; note = 2'-deoxy-2'-fluorouridine-3'-phosphate
  modified_base 20: mod_base = OTHER; note = 2'-O-methyladenosine-3'-phosphorothioate
  modified_base 21: mod_base = OTHER; note = 2'-deoxy-2'-fluoroadenosine
aacagtgttcttgctctataa

SEQ ID NO: 353 - RNA, 21 nt, synthetic construct
  source 1..21: mol_type = other RNA
  modified_base 1: mod_base = OTHER; note = 2'-deoxy-2'-fluoroadenosine-3'-phosphate
  modified_base 2: mod_base = OTHER; note = 2'-O-methyladenosine-3'-phosphate
  modified_base 3: mod_base = OTHER; note = 2'-deoxy-2'-fluorocytidine-3'-phosphate
  modified_base 4: mod_base = OTHER; note = 2'-deoxy-2'-fluoroadenosine-3'-phosphate
  modified_base 5: mod_base = OTHER; note = 2'-deoxy-2'-fluoroguanosine-3'-phosphate
  modified_base 6: mod_base = OTHER; note = 2'-O-methyluridine-3'-phosphate
  modified_base 7: mod_base = OTHER; note = 2'-deoxy-2'-fluoroguanosine-3'-phosphate
  modified_base 8: mod_base = OTHER; note = 2'-O-methyluridine-3'-phosphate
  modified_base 9: mod_base = OTHER; note = 2'-O-methyluridine-3'-phosphate
  modified_base 10: mod_base = OTHER; note = 2'-O-methylcytidine-3'-phosphate
  modified_base 11: mod_base = OTHER; note = 2'-deoxy-2'-fluorouridine-3'-phosphate
  modified_base 12: mod_base = OTHER; note = 2'-O-methyluridine-3'-phosphate
  modified_base 13: mod_base = OTHER; note = 2'-deoxy-2'-fluoroguanosine-3'-phosphate
  modified_base 14: mod_base = OTHER; note = 2'-O-methylcytidine-3'-phosphate
  modified_base 15: mod_base = OTHER; note = 2'-deoxy-2'-fluorouridine-3'-phosphate
  modified_base 16: mod_base = OTHER; note = 2'-O-methylcytidine-3'-phosphate
  modified_base 17: mod_base = OTHER; note = 2'-deoxy-2'-fluorouridine-3'-phosphate
  modified_base 18: mod_base = OTHER; note = 2'-O-methyladenosine-3'-phosphate
  modified_base 19: mod_base = OTHER; note = 2'-deoxy-2'-fluorouridine-3'-phosphate
  modified_base 20: mod_base = OTHER; note = 2'-O-methyladenosine-3'-phosphorothioate
  modified_base 21: mod_base = OTHER; note = 2'-deoxy-2'-fluoroadenosine
aacagtgttcttgctctataa

SEQ ID NO: 354 - RNA, 21 nt, synthetic construct
  source 1..21: mol_type = other RNA
  modified_base 1: mod_base = OTHER; note = 2'-deoxy-2'-fluoroadenosine-3'-phosphate
  modified_base 2: mod_base = OTHER; note = 2'-O-methyladenosine-3'-phosphate
  modified_base 3: mod_base = OTHER; note = 2'-deoxy-2'-fluorocytidine-3'-phosphate
  modified_base 4: mod_base = OTHER; note = 2'-O-methyladenosine-3'-phosphate
  modified_base 5: mod_base = OTHER; note = 2'-deoxy-2'-fluoroguanosine-3'-phosphate
  modified_base 6: mod_base = OTHER; note = 2'-O-methyluridine-3'-phosphate
  modified_base 7: mod_base = OTHER; note = 2'-deoxy-2'-fluoroguanosine-3'-phosphate
  modified_base 8: mod_base = OTHER; note = 2'-deoxy-2'-fluorouridine-3'-phosphate
  modified_base 9: mod_base = OTHER; note = 2'-deoxy-2'-fluorouridine-3'-phosphate
  modified_base 10: mod_base = OTHER; note = 2'-O-methylcytidine-3'-phosphate
  modified_base 11: mod_base = OTHER; note = 2'-deoxy-2'-fluorouridine-3'-phosphate
  modified_base 12: mod_base = OTHER; note = 2'-O-methyluridine-3'-phosphate
  modified_base 13: mod_base = OTHER; note = 2'-deoxy-2'-fluoroguanosine-3'-phosphate
  modified_base 14: mod_base = OTHER; note = 2'-O-methylcytidine-3'-phosphate
  modified_base 15: mod_base = OTHER; note = 2'-deoxy-2'-fluorouridine-3'-phosphate
  modified_base 16: mod_base = OTHER; note = 2'-O-methylcytidine-3'-phosphate
  modified_base 17: mod_base = OTHER; note = 2'-O-methyluridine-3'-phosphate
  modified_base 18: mod_base = OTHER; note = 2'-O-methyladenosine-3'-phosphate
  modified_base 19: mod_base = OTHER; note = 2'-deoxy-2'-fluorouridine-3'-phosphate
  modified_base 20: mod_base = OTHER; note = 2'-O-methyladenosine-3'-phosphorothioate
  modified_base 21: mod_base = OTHER; note = 2'-deoxy-2'-fluoroadenosine
aacagtgttcttgctctataa

SEQ ID NO: 355 - RNA, 21 nt, synthetic construct
  source 1..21: mol_type = other RNA
  modified_base 1: mod_base = OTHER; note = 2'-deoxy-2'-fluoroadenosine-3'-phosphate
  modified_base 2: mod_base = OTHER; note = 2'-O-methyladenosine-3'-phosphate
  modified_base 3: mod_base = OTHER; note = 2'-deoxy-2'-fluorocytidine-3'-phosphate
  modified_base 4: mod_base = OTHER; note = 2'-O-methyladenosine-3'-phosphate
  modified_base 5: mod_base = OTHER; note = 2'-O-methylguanosine-3'-phosphate
  modified_base 6: mod_base = OTHER; note = 2'-O-methyluridine-3'-phosphate
  modified_base 7: mod_base = OTHER; note = 2'-deoxy-2'-fluoroguanosine-3'-phosphate
  modified_base 8: mod_base = OTHER; note = 2'-O-methyluridine-3'-phosphate
  modified_base 9: mod_base = OTHER; note = 2'-deoxy-2'-fluorouridine-3'-phosphate
  modified_base 10: mod_base = OTHER; note = 2'-O-methylcytidine-3'-phosphate
  modified_base 11: mod_base = OTHER; note = 2'-deoxy-2'-fluorouridine-3'-phosphate
  modified_base 12: mod_base = OTHER; note = 2'-deoxy-2'-fluorouridine-3'-phosphate
  modified_base 13: mod_base = OTHER; note = 2'-deoxy-2'-fluoroguanosine-3'-phosphate
  modified_base 14: mod_base = OTHER; note = 2'-O-methylcytidine-3'-phosphate
  modified_base 15: mod_base = OTHER; note = 2'-deoxy-2'-fluorouridine-3'-phosphate
  modified_base 16: mod_base = OTHER; note = 2'-O-methylcytidine-3'-phosphate
  modified_base 17: mod_base = OTHER; note = 2'-deoxy-2'-fluorouridine-3'-phosphate
  modified_base 18: mod_base = OTHER; note = 2'-O-methyladenosine-3'-phosphate
  modified_base 19: mod_base = OTHER; note = 2'-deoxy-2'-fluorouridine-3'-phosphate
  modified_base 20: mod_base = OTHER; note = 2'-O-methyladenosine-3'-phosphorothioate
  modified_base 21: mod_base = OTHER; note = 2'-deoxy-2'-fluoroadenosine
aacagtgttcttgctctataa

SEQ ID NO: 356 - RNA, 21 nt, synthetic construct
  source 1..21: mol_type = other RNA
  modified_base 1: mod_base = OTHER; note = 2'-deoxy-2'-fluoroadenosine-3'-phosphate
  modified_base 2: mod_base = OTHER; note = 2'-O-methyladenosine-3'-phosphate
  modified_base 3: mod_base = OTHER; note = 2'-deoxy-2'-fluorocytidine-3'-phosphate
  modified_base 4: mod_base = OTHER; note = 2'-deoxy-2'-fluoroadenosine-3'-phosphate
  modified_base 5: mod_base = OTHER; note = 2'-deoxy-2'-fluoroguanosine-3'-phosphate
  modified_base 6: mod_base = OTHER; note = 2'-O-methyluridine-3'-phosphate
  modified_base 7: mod_base = OTHER; note = 2'-O-methylguanosine-3'-phosphate
  modified_base 8: mod_base = OTHER; note = 2'-O-methyluridine-3'-phosphate
  modified_base 9: mod_base = OTHER; note = 2'-deoxy-2'-fluorouridine-3'-phosphate
  modified_base 10: mod_base = OTHER; note = 2'-O-methylcytidine-3'-phosphate
  modified_base 11: mod_base = OTHER; note = 2'-deoxy-2'-fluorouridine-3'-phosphate
  modified_base 12: mod_base = OTHER; note = 2'-O-methyluridine-3'-phosphate
  modified_base 13: mod_base = OTHER; note = 2'-deoxy-2'-fluoroguanosine-3'-phosphate
  modified_base 14: mod_base = OTHER; note = 2'-O-methylcytidine-3'-phosphate
  modified_base 15: mod_base = OTHER; note = 2'-deoxy-2'-fluorouridine-3'-phosphate
  modified_base 16: mod_base = OTHER; note = 2'-O-methylcytidine-3'-phosphate
  modified_base 17: mod_base = OTHER; note = 2'-deoxy-2'-fluorouridine-3'-phosphate
  modified_base 18: mod_base = OTHER; note = 2'-O-methyladenosine-3'-phosphate
  modified_base 19: mod_base = OTHER; note = 2'-deoxy-2'-fluorouridine-3'-phosphate
  modified_base 20: mod_base = OTHER; note = 2'-O-methyladenosine-3'-phosphorothioate
  modified_base 21: mod_base = OTHER; note = 2'-deoxy-2'-fluoroadenosine
aacagtgttcttgctctataa

SEQ ID NO: 357 - RNA, 21 nt, synthetic construct
  source 1..21: mol_type = other RNA
  modified_base 1: mod_base = OTHER; note = 2'-deoxy-2'-fluoroadenosine-3'-phosphate
  modified_base 2: mod_base = OTHER; note = 2'-O-methyladenosine-3'-phosphate
  modified_base 3: mod_base = OTHER; note = 2'-deoxy-2'-fluorocytidine-3'-phosphate
  modified_base 4: mod_base = OTHER; note = 2'-O-methyladenosine-3'-phosphate
  modified_base 5: mod_base = OTHER; note = 2'-deoxy-2'-fluoroguanosine-3'-phosphate
  modified_base 6: mod_base = OTHER; note = 2'-deoxy-2'-fluorouridine-3'-phosphate
  modified_base 7: mod_base = OTHER; note = 2'-deoxy-2'-fluoroguanosine-3'-phosphate
  modified_base 8: mod_base = OTHER; note = 2'-O-methyluridine-3'-phosphate
  modified_base 9: mod_base = OTHER; note = 2'-deoxy-2'-fluorouridine-3'-phosphate
  modified_base 10: mod_base = OTHER; note = 2'-O-methylcytidine-3'-phosphate
  modified_base 11: mod_base = OTHER; note = 2'-O-methyluridine-3'-phosphate
  modified_base 12: mod_base = OTHER; note = 2'-O-methyluridine-3'-phosphate
  modified_base 13: mod_base = OTHER; note = 2'-deoxy-2'-fluoroguanosine-3'-phosphate
  modified_base 14: mod_base = OTHER; note = 2'-O-methylcytidine-3'-phosphate
  modified_base 15: mod_base = OTHER; note = 2'-deoxy-2'-fluorouridine-3'-phosphate
  modified_base 16: mod_base = OTHER; note = 2'-O-methylcytidine-3'-phosphate
  modified_base 17: mod_base = OTHER; note = 2'-deoxy-2'-fluorouridine-3'-phosphate
  modified_base 18: mod_base = OTHER; note = 2'-O-methyladenosine-3'-phosphate
  modified_base 19: mod_base = OTHER; note = 2'-deoxy-2'-fluorouridine-3'-phosphate
  modified_base 20: mod_base = OTHER; note = 2'-O-methyladenosine-3'-phosphorothioate
  modified_base 21: mod_base = OTHER; note = 2'-deoxy-2'-fluoroadenosine
aacagtgttcttgctctataa

SEQ ID NO: 358 - RNA, 21 nt, synthetic construct
  source 1..21: mol_type = other RNA
  modified_base 1: mod_base = OTHER; note = 2'-deoxy-2'-fluoroadenosine-3'-phosphate
  modified_base 2: mod_base = OTHER; note = 2'-O-methyladenosine-3'-phosphate
  modified_base 3: mod_base = OTHER; note = 2'-deoxy-2'-fluorocytidine-3'-phosphate
  modified_base 4: mod_base = OTHER; note = 2'-O-methyladenosine-3'-phosphate
  modified_base 5: mod_base = OTHER; note = 2'-deoxy-2'-fluoroguanosine-3'-phosphate
  modified_base 6: mod_base = OTHER; note = 2'-O-methyluridine-3'-phosphate
  modified_base 7: mod_base = OTHER; note = 2'-deoxy-2'-fluoroguanosine-3'-phosphate
  modified_base 8: mod_base = OTHER; note = 2'-deoxy-2'-fluorouridine-3'-phosphate
  modified_base 9: mod_base = OTHER; note = 2'-deoxy-2'-fluorouridine-3'-phosphate
  modified_base 10: mod_base = OTHER; note = 2'-O-methylcytidine-3'-phosphate
  modified_base 11: mod_base = OTHER; note = 2'-deoxy-2'-fluorouridine-3'-phosphate
  modified_base 12: mod_base = OTHER; note = 2'-O-methyluridine-3'-phosphate
  modified_base 13: mod_base = OTHER; note = 2'-deoxy-2'-fluoroguanosine-3'-phosphate
  modified_base 14: mod_base = OTHER; note = 2'-O-methylcytidine-3'-phosphate
  modified_base 15: mod_base = OTHER; note = 2'-O-methyluridine-3'-phosphate
  modified_base 16: mod_base = OTHER; note = 2'-O-methylcytidine-3'-phosphate
  modified_base 17: mod_base = OTHER; note = 2'-deoxy-2'-fluorouridine-3'-phosphate
  modified_base 18: mod_base = OTHER; note = 2'-O-methyladenosine-3'-phosphate
  modified_base 19: mod_base = OTHER; note = 2'-deoxy-2'-fluorouridine-3'-phosphate
  modified_base 20: mod_base = OTHER; note = 2'-O-methyladenosine-3'-phosphorothioate
  modified_base 21: mod_base = OTHER; note = 2'-deoxy-2'-fluoroadenosine
aacagtgttcttgctctataa

SEQ ID NO: 359 - RNA, 21 nt, synthetic construct
  source 1..21: mol_type = other RNA
  modified_base 1: mod_base = OTHER; note = 2'-deoxy-2'-fluoroadenosine-3'-phosphate
  modified_base 2: mod_base = OTHER; note = 2'-O-methyladenosine-3'-phosphate
  modified_base 3: mod_base = OTHER; note = 2'-O-methylcytidine-3'-phosphate
  modified_base 4: mod_base = OTHER; note = 2'-O-methyladenosine-3'-phosphate
  modified_base 5: mod_base = OTHER; note = 2'-deoxy-2'-fluoroguanosine-3'-phosphate
  modified_base 6: mod_base = OTHER; note = 2'-O-methyluridine-3'-phosphate
  modified_base 7: mod_base = OTHER; note = 2'-deoxy-2'-fluoroguanosine-3'-phosphate
  modified_base 8: mod_base = OTHER; note = 2'-O-methyluridine-3'-phosphate
  modified_base 9: mod_base = OTHER; note = 2'-deoxy-2'-fluorouridine-3'-phosphate
  modified_base 10: mod_base = OTHER; note = 2'-O-methylcytidine-3'-phosphate
  modified_base 11: mod_base = OTHER; note = 2'-deoxy-2'-fluorouridine-3'-phosphate
  modified_base 12: mod_base = OTHER; note = 2'-deoxy-2'-fluorouridine-3'-phosphate
  modified_base 13: mod_base = OTHER; note = 2'-deoxy-2'-fluoroguanosine-3'-phosphate
  modified_base 14: mod_base = OTHER; note = 2'-O-methylcytidine-3'-phosphate
  modified_base 15: mod_base = OTHER; note = 2'-deoxy-2'-fluorouridine-3'-phosphate
  modified_base 16: mod_base = OTHER; note = 2'-O-methylcytidine-3'-phosphate
  modified_base 17: mod_base = OTHER; note = 2'-deoxy-2'-fluorouridine-3'-phosphate
  modified_base 18: mod_base = OTHER; note = 2'-O-methyladenosine-3'-phosphate
  modified_base 19: mod_base = OTHER; note = 2'-deoxy-2'-fluorouridine-3'-phosphate
  modified_base 20: mod_base = OTHER; note = 2'-O-methyladenosine-3'-phosphorothioate
  modified_base 21: mod_base = OTHER; note = 2'-deoxy-2'-fluoroadenosine
aacagtgttcttgctctataa

SEQ ID NO: 360 - RNA, 21 nt, synthetic construct
  source 1..21: mol_type = other RNA
  modified_base 1: mod_base = OTHER; note = 2'-deoxy-2'-fluoroadenosine-3'-phosphate
  modified_base 2: mod_base = OTHER; note = 2'-O-methyladenosine-3'-phosphate
  modified_base 3: mod_base = OTHER; note = 2'-deoxy-2'-fluorocytidine-3'-phosphate
  modified_base 4: mod_base = OTHER; note = 2'-O-methyladenosine-3'-phosphate
  modified_base 5: mod_base = OTHER; note = 2'-deoxy-2'-fluoroguanosine-3'-phosphate
  modified_base 6: mod_base = OTHER; note = 2'-deoxy-2'-fluorouridine-3'-phosphate
  modified_base 7: mod_base = OTHER; note = 2'-deoxy-2'-fluoroguanosine-3'-phosphate
  modified_base 8: mod_base = OTHER; note = 2'-O-methyluridine-3'-phosphate
  modified_base 9: mod_base = OTHER; note = 2'-O-methyluridine-3'-phosphate
  modified_base 10: mod_base = OTHER; note = 2'-O-methylcytidine-3'-phosphate
  modified_base 11: mod_base = OTHER; note = 2'-deoxy-2'-fluorouridine-3'-phosphate
  modified_base 12: mod_base = OTHER; note = 2'-O-methyluridine-3'-phosphate
  modified_base 13: mod_base = OTHER; note = 2'-deoxy-2'-fluoroguanosine-3'-phosphate
  modified_base 14: mod_base = OTHER; note = 2'-O-methylcytidine-3'-phosphate
  modified_base 15: mod_base = OTHER; note = 2'-deoxy-2'-fluorouridine-3'-phosphate
  modified_base 16: mod_base = OTHER; note = 2'-O-methylcytidine-3'-phosphate
  modified_base 17: mod_base = OTHER; note = 2'-deoxy-2'-fluorouridine-3'-phosphate
  modified_base 18: mod_base = OTHER; note = 2'-O-methyladenosine-3'-phosphate
  modified_base 19: mod_base = OTHER; note = 2'-deoxy-2'-fluorouridine-3'-phosphate
  modified_base 20: mod_base = OTHER; note = 2'-O-methyladenosine-3'-phosphorothioate
  modified_base 21: mod_base = OTHER; note = 2'-deoxy-2'-fluoroadenosine
aacagtgttcttgctctataa

SEQ ID NO: 361 - RNA, 21 nt, synthetic construct
  source 1..21: mol_type = other RNA
  modified_base 1: mod_base = OTHER; note = 2'-deoxy-2'-fluoroadenosine-3'-phosphate
  modified_base 2: mod_base = OTHER; note = 2'-O-methyladenosine-3'-phosphate
  modified_base 3: mod_base = OTHER; note = 2'-deoxy-2'-fluorocytidine-3'-phosphate
  modified_base 4: mod_base = OTHER; note = 2'-O-methyladenosine-3'-phosphate
  modified_base 5: mod_base = OTHER; note = 2'-deoxy-2'-fluoroguanosine-3'-phosphate
  modified_base 6: mod_base = OTHER; note = 2'-O-methyluridine-3'-phosphate
  modified_base 7: mod_base = OTHER; note = 2'-deoxy-2'-fluoroguanosine-3'-phosphate
  modified_base 8: mod_base = OTHER; note = 2'-deoxy-2'-fluorouridine-3'-phosphate
  modified_base 9: mod_base = OTHER; note = 2'-deoxy-2'-fluorouridine-3'-phosphate
  modified_base 10: mod_base = OTHER; note = 2'-O-methylcytidine-3'-phosphate
  modified_base 11: mod_base = OTHER; note = 2'-deoxy-2'-fluorouridine-3'-phosphate
  modified_base 12: mod_base = OTHER; note = 2'-O-methyluridine-3'-phosphate
  modified_base 13: mod_base = OTHER; note = 2'-O-methylguanosine-3'-phosphate
  modified_base 14: mod_base = OTHER; note = 2'-O-methylcytidine-3'-phosphate
  modified_base 15: mod_base = OTHER; note = 2'-deoxy-2'-fluorouridine-3'-phosphate
  modified_base 16: mod_base = OTHER; note = 2'-O-methylcytidine-3'-phosphate
  modified_base 17: mod_base = OTHER; note = 2'-deoxy-2'-fluorouridine-3'-phosphate
  modified_base 18: mod_base = OTHER; note = 2'-O-methyladenosine-3'-phosphate
  modified_base 19: mod_base = OTHER; note = 2'-deoxy-2'-fluorouridine-3'-phosphate
  modified_base 20: mod_base = OTHER; note = 2'-O-methyladenosine-3'-phosphorothioate
  modified_base 21: mod_base = OTHER; note = 2'-deoxy-2'-fluoroadenosine
aacagtgttcttgctctataa

SEQ ID NO: 362 - RNA, 21 nt, synthetic construct
  source 1..21: mol_type = other RNA
  modified_base 1: mod_base = OTHER; note = 2'-deoxy-2'-fluoroadenosine-3'-phosphate
  modified_base 2: mod_base = OTHER; note = 2'-O-methyladenosine-3'-phosphate
  modified_base 3: mod_base = OTHER; note = 2'-deoxy-2'-fluorocytidine-3'-phosphate
  modified_base 4: mod_base = OTHER; note = 2'-deoxy-2'-fluoroadenosine-3'-phosphate
  modified_base 5: mod_base = OTHER; note = 2'-deoxy-2'-fluoroguanosine-3'-phosphate
  modified_base 6: mod_base = OTHER; note = 2'-O-methyluridine-3'-phosphate
  modified_base 7: mod_base = OTHER; note = 2'-deoxy-2'-fluoroguanosine-3'-phosphate
  modified_base 8: mod_base = OTHER; note = 2'-O-methyluridine-3'-phosphate
  modified_base 9: mod_base = OTHER; note = 2'-deoxy-2'-fluorouridine-3'-phosphate
  modified_base 10: mod_base = OTHER; note = 2'-O-methylcytidine-3'-phosphate
  modified_base 11: mod_base = OTHER; note = 2'-deoxy-2'-fluorouridine-3'-phosphate
  modified_base 12: mod_base = OTHER; note = 2'-O-methyluridine-3'-phosphate
  modified_base 13: mod_base = OTHER; note = 2'-deoxy-2'-fluoroguanosine-3'-phosphate
  modified_base 14: mod_base = OTHER; note = 2'-O-methylcytidine-3'-phosphate
  modified_base 15: mod_base = OTHER; note = 2'-deoxy-2'-fluorouridine-3'-phosphate
  modified_base 16: mod_base = OTHER; note = 2'-O-methylcytidine-3'-phosphate
  modified_base 17: mod_base = OTHER; note = 2'-deoxy-2'-fluorouridine-3'-phosphate
  modified_base 18: mod_base = OTHER; note = 2'-O-methyladenosine-3'-phosphate
  modified_base 19: mod_base = OTHER; note = 2'-deoxy-2'-fluorouridine-3'-phosphate
  modified_base 20: mod_base = OTHER; note = 2'-O-methyladenosine-3'-phosphorothioate
  modified_base 21: mod_base = OTHER; note = 2'-deoxy-2'-fluoroadenosine
aacagtgttcttgctctataa

SEQ ID NO: 363 - RNA, 21 nt, synthetic construct
  source 1..21: mol_type = other RNA
  modified_base 1: mod_base = OTHER; note = 2'-deoxy-2'-fluoroadenosine-3'-phosphate
  modified_base 2: mod_base = OTHER; note = 2'-O-methyladenosine-3'-phosphate
  modified_base 3: mod_base = OTHER; note = 2'-deoxy-2'-fluorocytidine-3'-phosphate
  modified_base 4: mod_base = OTHER; note = 2'-O-methyladenosine-3'-phosphate
  modified_base 5: mod_base = OTHER; note = 2'-deoxy-2'-fluoroguanosine-3'-phosphate
  modified_base 6: mod_base = OTHER; note = 2'-O-methyluridine-3'-phosphate
  modified_base 7: mod_base = OTHER; note = 2'-deoxy-2'-fluoroguanosine-3'-phosphate
  modified_base 8: mod_base = OTHER; note = 2'-deoxy-2'-fluorouridine-3'-phosphate
  modified_base 9: mod_base = OTHER; note = 2'-deoxy-2'-fluorouridine-3'-phosphate
  modified_base 10: mod_base = OTHER; note = 2'-O-methylcytidine-3'-phosphate
  modified_base 11: mod_base = OTHER; note = 2'-O-methyluridine-3'-phosphate
  modified_base 12: mod_base = OTHER; note = 2'-O-methyluridine-3'-phosphate
  modified_base 13: mod_base = OTHER; note = 2'-deoxy-2'-fluoroguanosine-3'-phosphate
  modified_base 14: mod_base = OTHER; note = 2'-O-methylcytidine-3'-phosphate
  modified_base 15: mod_base = OTHER; note = 2'-deoxy-2'-fluorouridine-3'-phosphate
  modified_base 16: mod_base = OTHER; note = 2'-O-methylcytidine-3'-phosphate
  modified_base 17: mod_base = OTHER; note = 2'-deoxy-2'-fluorouridine-3'-phosphate
  modified_base 18: mod_base = OTHER; note = 2'-O-methyladenosine-3'-phosphate
  modified_base 19: mod_base = OTHER; note = 2'-deoxy-2'-fluorouridine-3'-phosphate
  modified_base 20: mod_base = OTHER; note = 2'-O-methyladenosine-3'-phosphorothioate
  modified_base 21: mod_base = OTHER; note = 2'-deoxy-2'-fluoroadenosine
aacagtgttcttgctctataa

SEQ ID NO: 364 - RNA, 21 nt, synthetic construct
  source 1..21: mol_type = other RNA
  modified_base 1: mod_base = OTHER; note = 2'-deoxy-2'-fluoroadenosine-3'-phosphate
  modified_base 2: mod_base = OTHER; note = 2'-O-methyladenosine-3'-phosphate
  modified_base 3: mod_base = OTHER; note = 2'-deoxy-2'-fluorocytidine-3'-phosphate
  modified_base 4: mod_base = OTHER; note = 2'-O-methyladenosine-3'-phosphate
  modified_base 5: mod_base = OTHER; note = 2'-deoxy-2'-fluoroguanosine-3'-phosphate
  modified_base 6: mod_base = OTHER; note = 2'-O-methyluridine-3'-phosphate
  modified_base 7: mod_base = OTHER; note = 2'-deoxy-2'-fluoroguanosine-3'-phosphate
  modified_base 8: mod_base = OTHER; note = 2'-O-methyluridine-3'-phosphate
  modified_base 9: mod_base = OTHER; note = 2'-deoxy-2'-fluorouridine-3'-phosphate
  modified_base 10: mod_base = OTHER; note = 2'-O-methylcytidine-3'-phosphate
  modified_base 11: mod_base = OTHER; note = 2'-deoxy-2'-fluorouridine-3'-phosphate
  modified_base 12: mod_base = OTHER; note = 2'-deoxy-2'-fluorouridine-3'-phosphate
  modified_base 13: mod_base = OTHER; note = 2'-deoxy-2'-fluoroguanosine-3'-phosphate
  modified_base 14: mod_base = OTHER; note = 2'-O-methylcytidine-3'-phosphate
  modified_base 15: mod_base = OTHER; note = 2'-deoxy-2'-fluorouridine-3'-phosphate
  modified_base 16: mod_base = OTHER; note = 2'-O-methylcytidine-3'-phosphate
  modified_base 17: mod_base = OTHER; note = 2'-deoxy-2'-fluorouridine-3'-phosphate
  modified_base 18: mod_base = OTHER; note = 2'-O-methyladenosine-3'-phosphate
  modified_base 19: mod_base = OTHER; note = 2'-deoxy-2'-fluorouridine-3'-phosphate
  modified_base 20: mod_base = OTHER; note = 2'-O-methyladenosine-3'-phosphorothioate
  modified_base 21: mod_base = OTHER; note = 2'-deoxy-2'-fluoroadenosine
aacagtgttcttgctctataa

SEQ ID NO: 365 - RNA, 21 nt, synthetic construct
  source 1..21: mol_type = other RNA
  modified_base 1: mod_base = OTHER; note = 2'-deoxy-2'-fluoroadenosine-3'-phosphate
  modified_base 2: mod_base = OTHER; note = 2'-O-methyladenosine-3'-phosphate
  modified_base 3: mod_base = OTHER; note = 2'-deoxy-2'-fluorocytidine-3'-phosphate
  modified_base 4: mod_base = OTHER; note = 2'-O-methyladenosine-3'-phosphate
  modified_base 5: mod_base = OTHER; note = 2'-O-methylguanosine-3'-phosphate
  modified_base 6: mod_base = OTHER; note = 2'-O-methyluridine-3'-phosphate
  modified_base 7: mod_base = OTHER; note = 2'-deoxy-2'-fluoroguanosine-3'-phosphate
  modified_base 8: mod_base = OTHER; note = 2'-deoxy-2'-fluorouridine-3'-phosphate
  modified_base 9: mod_base = OTHER; note = 2'-deoxy-2'-fluorouridine-3'-phosphate
  modified_base 10: mod_base = OTHER; note = 2'-O-methylcytidine-3'-phosphate
  modified_base 11: mod_base = OTHER; note = 2'-deoxy-2'-fluorouridine-3'-phosphate
  modified_base 12: mod_base = OTHER; note = 2'-O-methyluridine-3'-phosphate
  modified_base 13: mod_base = OTHER; note = 2'-deoxy-2'-fluoroguanosine-3'-phosphate
  modified_base 14: mod_base = OTHER; note = 2'-O-methylcytidine-3'-phosphate
  modified_base 15: mod_base = OTHER; note = 2'-deoxy-2'-fluorouridine-3'-phosphate
  modified_base 16: mod_base = OTHER; note = 2'-O-methylcytidine-3'-phosphate
  modified_base 17: mod_base = OTHER; note = 2'-deoxy-2'-fluorouridine-3'-phosphate
  modified_base 18: mod_base = OTHER; note = 2'-O-methyladenosine-3'-phosphate
  modified_base 19: mod_base = OTHER; note = 2'-deoxy-2'-fluorouridine-3'-phosphate
  modified_base 20: mod_base = OTHER; note = 2'-O-methyladenosine-3'-phosphorothioate
  modified_base 21: mod_base = OTHER; note = 2'-deoxy-2'-fluoroadenosine
aacagtgttcttgctctataa

SEQ ID NO: 366 - RNA, 21 nt, synthetic construct
  source 1..21: mol_type = other RNA
  modified_base 1: mod_base = OTHER; note = 2'-deoxy-2'-fluoroadenosine-3'-phosphate
  modified_base 2: mod_base = OTHER; note = 2'-O-methyladenosine-3'-phosphate
  modified_base 3: mod_base = OTHER; note = 2'-deoxy-2'-fluorocytidine-3'-phosphate
  modified_base 4: mod_base = OTHER; note = 2'-O-methyladenosine-3'-phosphate
  modified_base 5: mod_base = OTHER; note = 2'-deoxy-2'-fluoroguanosine-3'-phosphate
  modified_base 6: mod_base = OTHER; note = 2'-O-methyluridine-3'-phosphate
  modified_base 7: mod_base = OTHER; note = 2'-deoxy-2'-fluoroguanosine-3'-phosphate
  modified_base 8: mod_base = OTHER; note = 2'-O-methyluridine-3'-phosphate
  modified_base 9: mod_base = OTHER; note = 2'-deoxy-2'-fluorouridine-3'-phosphate
  modified_base 10: mod_base = OTHER; note = 2'-O-methylcytidine-3'-phosphate
  modified_base 11: mod_base = OTHER; note = 2'-deoxy-2'-fluorouridine-3'-phosphate
  modified_base 12: mod_base = OTHER; note = 2'-deoxy-2'-fluorouridine-3'-phosphate
  modified_base 13: mod_base = OTHER; note = 2'-deoxy-2'-fluoroguanosine-3'-phosphate
  modified_base 14: mod_base = OTHER; note = 2'-O-methylcytidine-3'-phosphate
  modified_base 15: mod_base = OTHER; note = 2'-deoxy-2'-fluorouridine-3'-phosphate
  modified_base 16: mod_base = OTHER; note = 2'-O-methylcytidine-3'-phosphate
  modified_base 17: mod_base = OTHER; note = 2'-O-methyluridine-3'-phosphate
  modified_base 18: mod_base = OTHER; note = 2'-O-methyladenosine-3'-phosphate
  modified_base 19: mod_base = OTHER; note = 2'-deoxy-2'-fluorouridine-3'-phosphate
  modified_base 20: mod_base = OTHER; note = 2'-O-methyladenosine-3'-phosphorothioate
  modified_base 21: mod_base = OTHER; note = 2'-deoxy-2'-fluoroadenosine
aacagtgttcttgctctataa

SEQ ID NO: 367 - RNA, 21 nt, synthetic construct
  source 1..21: mol_type = other RNA
  modified_base 1: mod_base = OTHER; note = 2'-O-methyladenosine-3'-phosphate
  modified_base 2: mod_base = OTHER; note = 2'-O-methyladenosine-3'-phosphate
  modified_base 3: mod_base = OTHER; note = 2'-deoxy-2'-fluorocytidine-3'-phosphate
  modified_base 4: mod_base = OTHER; note = 2'-O-methyladenosine-3'-phosphate
  modified_base 5: mod_base = OTHER; note = 2'-deoxy-2'-fluoroguanosine-3'-phosphate
  modified_base 6: mod_base = OTHER; note = 2'-O-methyluridine-3'-phosphate
  modified_base 7: mod_base = OTHER; note = 2'-deoxy-2'-fluoroguanosine-3'-phosphate
  modified_base 8: mod_base = OTHER; note = 2'-O-methyluridine-3'-phosphate
  modified_base 9: mod_base = OTHER; note = 2'-deoxy-2'-fluorouridine-3'-phosphate
  modified_base 10: mod_base = OTHER; note = 2'-O-methylcytidine-3'-phosphate
  modified_base 11: mod_base = OTHER; note = 2'-deoxy-2'-fluorouridine-3'-phosphate
  modified_base 12: mod_base = OTHER; note = 2'-O-methyluridine-3'-phosphate
  modified_base 13: mod_base = OTHER; note = 2'-deoxy-2'-fluoroguanosine-3'-phosphate
  modified_base 14: mod_base = OTHER; note = 2'-deoxy-2'-fluorocytidine-3'-phosphate
  modified_base 15: mod_base = OTHER; note = 2'-deoxy-2'-fluorouridine-3'-phosphate
  modified_base 16: mod_base = OTHER; note = 2'-O-methylcytidine-3'-phosphate
  modified_base 17: mod_base = OTHER; note = 2'-deoxy-2'-fluorouridine-3'-phosphate
  modified_base 18: mod_base = OTHER; note = 2'-O-methyladenosine-3'-phosphate
  modified_base 19: mod_base = OTHER; note = 2'-deoxy-2'-fluorouridine-3'-phosphate
  modified_base 20: mod_base = OTHER; note = 2'-O-methyladenosine-3'-phosphorothioate
  modified_base 21: mod_base = OTHER; note = 2'-deoxy-2'-fluoroadenosine
aacagtgttcttgctctataa

SEQ ID NO: 368 - RNA, 21 nt, synthetic construct
  source 1..21: mol_type = other RNA
  modified_base 1: mod_base = OTHER; note = 2'-deoxy-2'-fluoroadenosine-3'-phosphate
  modified_base 2: mod_base = OTHER; note = 2'-O-methyladenosine-3'-phosphate
  modified_base 3: mod_base = OTHER; note = 2'-deoxy-2'-fluorocytidine-3'-phosphate
  modified_base 4: mod_base = OTHER; note = 2'-O-methyladenosine-3'-phosphate
  modified_base 5: mod_base = OTHER; note = 2'-deoxy-2'-fluoroguanosine-3'-phosphate
  modified_base 6: mod_base = OTHER; note = 2'-O-methyluridine-3'-phosphate
  modified_base 7: mod_base = OTHER; note = 2'-deoxy-2'-fluoroguanosine-3'-phosphate
  modified_base 8: mod_base = OTHER; note = 2'-O-methyluridine-3'-phosphate
  modified_base 9: mod_base = OTHER; note = 2'-O-methyluridine-3'-phosphate
  modified_base 10: mod_base = OTHER; note = 2'-O-methylcytidine-3'-phosphate
  modified_base 11: mod_base = OTHER; note = 2'-deoxy-2'-fluorouridine-3'-phosphate
  modified_base 12: mod_base = OTHER; note = 2'-O-methyluridine-3'-phosphate
  modified_base 13: mod_base = OTHER; note = 2'-deoxy-2'-fluoroguanosine-3'-phosphate
  modified_base 14: mod_base = OTHER; note = 2'-O-methylcytidine-3'-phosphate
  modified_base 15: mod_base = OTHER; note = 2'-deoxy-2'-fluorouridine-3'-phosphate
  modified_base 16: mod_base = OTHER; note = 2'-O-methylcytidine-3'-phosphate
  modified_base 17: mod_base = OTHER; note = 2'-deoxy-2'-fluorouridine-3'-phosphate
  modified_base 18: mod_base = OTHER; note = 2'-deoxy-2'-fluoroadenosine-3'-phosphate
  modified_base 19: mod_base = OTHER; note = 2'-deoxy-2'-fluorouridine-3'-phosphate
  modified_base 20: mod_base = OTHER; note = 2'-O-methyladenosine-3'-phosphorothioate
  modified_base 21: mod_base = OTHER; note = 2'-deoxy-2'-fluoroadenosine
aacagtgttcttgctctataa

SEQ ID NO: 369 - RNA, 21 nt, synthetic construct
  source 1..21: mol_type = other RNA
  modified_base 1: mod_base = OTHER; note = 2'-deoxy-2'-fluoroadenosine-3'-phosphate
  modified_base 2: mod_base = OTHER; note = 2'-O-methyladenosine-3'-phosphate
  modified_base 3: mod_base = OTHER; note = 2'-deoxy-2'-fluorocytidine-3'-phosphate
  modified_base 4: mod_base = OTHER; note = 2'-O-methyladenosine-3'-phosphate
  modified_base 5: mod_base = OTHER; note = 2'-deoxy-2'-fluoroguanosine-3'-phosphate
  modified_base 6: mod_base = OTHER; note = 2'-O-methyluridine-3'-phosphate
  modified_base 7: mod_base = OTHER; note = 2'-deoxy-2'-fluoroguanosine-3'-phosphate
  modified_base 8: mod_base = OTHER; note = 2'-O-methyluridine-3'-phosphate
  modified_base 9: mod_base = OTHER; note = 2'-deoxy-2'-fluorouridine-3'-phosphate
  modified_base 10: mod_base = OTHER; note = 2'-O-methylcytidine-3'-phosphate
  modified_base 11: mod_base = OTHER; note = 2'-deoxy-2'-fluorouridine-3'-phosphate
  modified_base 12: mod_base = OTHER; note = 2'-O-methyluridine-3'-phosphate
  modified_base 13: mod_base = OTHER; note = 2'-O-methylguanosine-3'-phosphate
  modified_base 14: mod_base = OTHER; note = 2'-O-methylcytidine-3'-phosphate
  modified_base 15: mod_base = OTHER; note = 2'-deoxy-2'-fluorouridine-3'-phosphate
  modified_base 16: mod_base = OTHER; note = 2'-O-methylcytidine-3'-phosphate
  modified_base 17: mod_base = OTHER; note = 2'-deoxy-2'-fluorouridine-3'-phosphate
  modified_base 18: mod_base = OTHER; note = 2'-O-methyladenosine-3'-phosphate
  modified_base 19: mod_base = OTHER; note = 2'-deoxy-2'-fluorouridine-3'-phosphate
  modified_base 20: mod_base = OTHER; note = 2'-deoxy-2'-fluoroadenosine-3'-phosphorothioate
  modified_base 21: mod_base = OTHER; note = 2'-deoxy-2'-fluoroadenosine
aacagtgttcttgctctataa

SEQ ID NO: 370 - RNA, 21 nt, synthetic construct
  source 1..21: mol_type = other RNA
  modified_base 1: mod_base = OTHER; note = 2'-O-methyladenosine-3'-phosphate
  modified_base 2: mod_base = OTHER; note = 2'-O-methyladenosine-3'-phosphate
  modified_base 3: mod_base = OTHER; note = 2'-O-methylcytidine-3'-phosphate
  modified_base 4: mod_base = OTHER; note = 2'-O-methyladenosine-3'-phosphate
  modified_base 5: mod_base = OTHER; note = 2'-O-methylguanosine-3'-phosphate
  modified_base 6: mod_base = OTHER; note = 2'-O-methyluridine-3'-phosphate
  modified_base 7: mod_base = OTHER; note = 2'-O-methylguanosine-3'-phosphate
  modified_base 8: mod_base = OTHER; note = 2'-O-methyluridine-3'-phosphate
  modified_base 9: mod_base = OTHER; note = 2'-O-methyluridine-3'-phosphate
  modified_base 10: mod_base = OTHER; note = 2'-O-methylcytidine-3'-phosphate
  modified_base 11: mod_base = OTHER; note = 2'-O-methyluridine-3'-phosphate
  modified_base 12: mod_base = OTHER; note = 2'-O-methyluridine-3'-phosphate
  modified_base 13: mod_base = OTHER; note = 2'-O-methylguanosine-3'-phosphate
  modified_base 14: mod_base = OTHER; note = 2'-O-methylcytidine-3'-phosphate
  modified_base 15: mod_base = OTHER; note = 2'-O-methyluridine-3'-phosphate
  modified_base 16: mod_base = OTHER; note = 2'-O-methylcytidine-3'-phosphate
  modified_base 17: mod_base = OTHER; note = 2'-O-methyluridine-3'-phosphate
  modified_base 18: mod_base = OTHER; note = 2'-O-methyladenosine-3'-phosphate
  modified_base 19: mod_base = OTHER; note = 2'-O-methyluridine-3'-phosphate
  modified_base 20: mod_base = OTHER; note = 2'-O-methyladenosine-3'-phosphorothioate
  modified_base 21: mod_base = OTHER; note = 2'-O-methyladenosine
aacagtgttcttgctctataa

SEQ ID NO: 371 - RNA, 21 nt, synthetic construct
  source 1..21: mol_type = other RNA
  modified_base 1: mod_base = OTHER; note = 2'-deoxy-2'-fluoroadenosine-3'-phosphate
  modified_base 2: mod_base = OTHER; note = 2'-O-methyladenosine-3'-phosphate
  modified_base 3: mod_base = OTHER; note = 2'-deoxy-2'-fluorocytidine-3'-phosphate
  modified_base 4: mod_base = OTHER; note = 2'-O-methyladenosine-3'-phosphate
  modified_base 5: mod_base = OTHER; note = 2'-deoxy-2'-fluoroguanosine-3'-phosphate
  modified_base 6: mod_base = OTHER; note = 2'-O-methyluridine-3'-phosphate
  modified_base 7: mod_base = OTHER; note = 2'-deoxy-2'-fluoroguanosine-3'-phosphate
  modified_base 8: mod_base = OTHER; note = 2'-O-methyluridine-3'-phosphate
  modified_base 9: mod_base = OTHER; note = 2'-deoxy-2'-fluorouridine-3'-phosphate
  modified_base 10: mod_base = OTHER; note = 2'-O-methylcytidine-3'-phosphate
  modified_base 11: mod_base = OTHER; note = 2'-deoxy-2'-fluorouridine-3'-phosphate
  modified_base 12: mod_base = OTHER; note = 2'-O-methyluridine-3'-phosphate
  modified_base 13: mod_base = OTHER; note = 2'-deoxy-2'-fluoroguanosine-3'-phosphate
  modified_base 14: mod_base = OTHER; note = 2'-deoxy-2'-fluorocytidine-3'-phosphate
  modified_base 15: mod_base = OTHER; note = 2'-deoxy-2'-fluorouridine-3'-phosphate
  modified_base 16: mod_base = OTHER; note = 2'-O-methylcytidine-3'-phosphate
  modified_base 17: mod_base = OTHER; note = 2'-deoxy-2'-fluorouridine-3'-phosphate
  modified_base 18: mod_base = OTHER; note = 2'-O-methyladenosine-3'-phosphate
  modified_base 19: mod_base = OTHER; note = 2'-O-methyluridine-3'-phosphate
  modified_base 20: mod_base = OTHER; note = 2'-O-methyladenosine-3'-phosphorothioate
  modified_base 21: mod_base = OTHER; note = 2'-deoxy-2'-fluoroadenosine
aacagtgttcttgctctataa

SEQ ID NO: 372 - RNA, 21 nt, synthetic construct
  source 1..21: mol_type = other RNA
  modified_base 1: mod_base = OTHER; note = 2'-deoxy-2'-fluoroadenosine-3'-phosphate
  modified_base 2: mod_base = OTHER; note = 2'-O-methyladenosine-3'-phosphate
  modified_base 3: mod_base = OTHER; note = 2'-deoxy-2'-fluorocytidine-3'-phosphate
  modified_base 4: mod_base = OTHER; note = 2'-O-methyladenosine-3'-phosphate
  modified_base 5: mod_base = OTHER; note = 2'-deoxy-2'-fluoroguanosine-3'-phosphate
  modified_base 6: mod_base = OTHER; note = 2'-O-methyluridine-3'-phosphate
  modified_base 7: mod_base = OTHER; note = 2'-deoxy-2'-fluoroguanosine-3'-phosphate
  modified_base 8: mod_base = OTHER; note = 2'-O-methyluridine-3'-phosphate
  modified_base 9: mod_base = OTHER; note = 2'-deoxy-2'-fluorouridine-3'-phosphate
  modified_base 10: mod_base = OTHER; note = 2'-O-methylcytidine-3'-phosphate
  modified_base 11: mod_base = OTHER; note = 2'-deoxy-2'-fluorouridine-3'-phosphate
  modified_base 12: mod_base = OTHER; note = 2'-O-methyluridine-3'-phosphate
  modified_base 13: mod_base = OTHER; note = 2'-deoxy-2'-fluoroguanosine-3'-phosphate
  modified_base 14: mod_base = OTHER; note = 2'-deoxy-2'-fluorocytidine-3'-phosphate
  modified_base 15: mod_base = OTHER; note = 2'-deoxy-2'-fluorouridine-3'-phosphate
  modified_base 16: mod_base = OTHER; note = 2'-O-methylcytidine-3'-phosphate
  modified_base 17: mod_base = OTHER; note = 2'-deoxy-2'-fluorouridine-3'-phosphate
  modified_base 18: mod_base = OTHER; note = 2'-O-methyladenosine-3'-phosphate
  modified_base 19: mod_base = OTHER; note = 2'-deoxy-2'-fluorouridine-3'-phosphate
  modified_base 20: mod_base = OTHER; note = 2'-O-methyladenosine-3'-phosphorothioate
  modified_base 21: mod_base = OTHER; note = 2'-deoxy-2'-fluoroadenosine
aacagtgttcttgctctataa

SEQ ID NO: 373 - RNA, 21 nt, synthetic construct
  source 1..21: mol_type = other RNA
  modified_base 1: mod_base = OTHER; note = 2'-deoxy-2'-fluoroadenosine-3'-phosphate
  modified_base 2: mod_base = OTHER; note = 2'-O-methyladenosine-3'-phosphate
  modified_base 3: mod_base = OTHER; note = 2'-deoxy-2'-fluorocytidine-3'-phosphate
  modified_base 4: mod_base = OTHER; note = 2'-O-methyladenosine-3'-phosphate
  modified_base 5: mod_base = OTHER; note = 2'-deoxy-2'-fluoroguanosine-3'-phosphate
  modified_base 6: mod_base = OTHER; note = 2'-O-methyluridine-3'-phosphate
  modified_base 7: mod_base = OTHER; note = 2'-O-methylguanosine-3'-phosphate
  modified_base 8: mod_base = OTHER; note = 2'-O-methyluridine-3'-phosphate
  modified_base 9: mod_base = OTHER; note = 2'-deoxy-2'-fluorouridine-3'-phosphate
  modified_base 10: mod_base = OTHER; note = 2'-O-methylcytidine-3'-phosphate
  modified_base 11: mod_base = OTHER; note = 2'-deoxy-2'-fluorouridine-3'-phosphate
  modified_base 12: mod_base = OTHER; note = 2'-O-methyluridine-3'-phosphate
  modified_base 13: mod_base = OTHER; note = 2'-deoxy-2'-fluoroguanosine-3'-phosphate
  modified_base 14: mod_base = OTHER; note = 2'-O-methylcytidine-3'-phosphate
  modified_base 15: mod_base = OTHER; note = 2'-deoxy-2'-fluorouridine-3'-phosphate
  modified_base 16: mod_base = OTHER; note = 2'-O-methylcytidine-3'-phosphate
  modified_base 17: mod_base = OTHER; note = 2'-deoxy-2'-fluorouridine-3'-phosphate
  modified_base 18: mod_base = OTHER; note = 2'-deoxy-2'-fluoroadenosine-3'-phosphate
  modified_base 19: mod_base = OTHER; note = 2'-deoxy-2'-fluorouridine-3'-phosphate
  modified_base 20: mod_base = OTHER; note = 2'-O-methyladenosine-3'-phosphorothioate
  modified_base 21: mod_base = OTHER; note = 2'-deoxy-2'-fluoroadenosine
aacagtgttcttgctctataa

SEQ ID NO: 374 - RNA, 21 nt, synthetic construct
  source 1..21: mol_type = other RNA
  modified_base 1: mod_base = OTHER; note = 2'-deoxy-2'-fluoroadenosine-3'-phosphate
  modified_base 2: mod_base = OTHER; note = 2'-O-methyladenosine-3'-phosphate
  modified_base 3: mod_base = OTHER; note = 2'-deoxy-2'-fluorocytidine-3'-phosphate
  modified_base 4: mod_base = OTHER; note = 2'-O-methyladenosine-3'-phosphate
  modified_base 5: mod_base = OTHER; note = 2'-deoxy-2'-fluoroguanosine-3'-phosphate
  modified_base 6: mod_base = OTHER; note = 2'-O-methyluridine-3'-phosphate
  modified_base 7: mod_base = OTHER; note = 2'-deoxy-2'-fluoroguanosine-3'-phosphate
  modified_base 8: mod_base = OTHER; note = 2'-O-methyluridine-3'-phosphate
  modified_base 9: mod_base = OTHER; note = 2'-deoxy-2'-fluorouridine-3'-phosphate
  modified_base 10: mod_base = OTHER; note = 2'-O-methylcytidine-3'-phosphate
  modified_base 11: mod_base = OTHER; note = 2'-O-methyluridine-3'-phosphate
  modified_base 12: mod_base = OTHER; note = 2'-O-methyluridine-3'-phosphate
  modified_base 13: mod_base = OTHER; note = 2'-deoxy-2'-fluoroguanosine-3'-phosphate
  modified_base 14: mod_base = OTHER; note = 2'-O-methylcytidine-3'-phosphate
  modified_base 15: mod_base = OTHER; note = 2'-deoxy-2'-fluorouridine-3'-phosphate
  modified_base 16: mod_base = OTHER; note = 2'-O-methylcytidine-3'-phosphate
  modified_base 17: mod_base = OTHER; note = 2'-deoxy-2'-fluorouridine-3'-phosphate
  modified_base 18: mod_base = OTHER; note = 2'-O-methyladenosine-3'-phosphate
  modified_base 19: mod_base = OTHER; note = 2'-deoxy-2'-fluorouridine-3'-phosphate
  modified_base 20: mod_base = OTHER; note = 2'-deoxy-2'-fluoroadenosine-3'-phosphorothioate
  modified_base 21: mod_base = OTHER; note = 2'-deoxy-2'-fluoroadenosine
aacagtgttcttgctctataa

SEQ ID NO: 375 - RNA, 21 nt, synthetic construct
  source 1..21: mol_type = other RNA
  modified_base 1: mod_base = OTHER; note = 2'-deoxy-2'-fluoroadenosine-3'-phosphate
  modified_base 2: mod_base = OTHER; note = 2'-O-methyladenosine-3'-phosphate
  modified_base 3: mod_base = OTHER; note = 2'-deoxy-2'-fluorocytidine-3'-phosphate
  modified_base 4: mod_base = OTHER; note = 2'-O-methyladenosine-3'-phosphate
  modified_base 5: mod_base = OTHER; note = 2'-deoxy-2'-fluoroguanosine-3'-phosphate
  modified_base 6: mod_base = OTHER; note = 2'-O-methyluridine-3'-phosphate
  modified_base 7: mod_base = OTHER; note = 2'-deoxy-2'-fluoroguanosine-3'-phosphate
  modified_base 8: mod_base = OTHER; note = 2'-O-methyluridine-3'-phosphate
  modified_base 9: mod_base = OTHER; note = 2'-deoxy-2'-fluorouridine-3'-phosphate
  modified_base 10: mod_base = OTHER; note = 2'-O-methylcytidine-3'-phosphate
  modified_base 11: mod_base = OTHER; note = 2'-deoxy-2'-fluorouridine-3'-phosphate
  modified_base 12: mod_base = OTHER; note = 2'-O-methyluridine-3'-phosphate
  modified_base 13: mod_base = OTHER; note = 2'-deoxy-2'-fluoroguanosine-3'-phosphate
  modified_base 14: mod_base = OTHER; note = 2'-deoxy-2'-fluorocytidine-3'-phosphate
  modified_base 15: mod_base = OTHER; note = 2'-deoxy-2'-fluorouridine-3'-phosphate
  modified_base 16: mod_base = OTHER; note = 2'-O-methylcytidine-3'-phosphate
  modified_base 17: mod_base = OTHER; note = 2'-O-methyluridine-3'-phosphate
  modified_base 18: mod_base = OTHER; note = 2'-O-methyladenosine-3'-phosphate
  modified_base 19: mod_base = OTHER; note = 2'-deoxy-2'-fluorouridine-3'-phosphate
  modified_base 20: mod_base = OTHER; note = 2'-O-methyladenosine-3'-phosphorothioate
  modified_base 21: mod_base = OTHER; note = 2'-deoxy-2'-fluoroadenosine
aacagtgttcttgctctataa

SEQ ID NO: 376 - RNA, 21 nt, synthetic construct
  source 1..21: mol_type = other RNA
  modified_base 1: mod_base = OTHER; note = 2'-deoxy-2'-fluoroadenosine-3'-phosphate
  modified_base 2: mod_base = OTHER; note = 2'-O-methyladenosine-3'-phosphate
  modified_base 3: mod_base = OTHER; note = 2'-deoxy-2'-fluorocytidine-3'-phosphate
  modified_base 4: mod_base = OTHER; note = 2'-O-methyladenosine-3'-phosphate
  modified_base 5: mod_base = OTHER; note = 2'-deoxy-2'-fluoroguanosine-3'-phosphate
  modified_base 6: mod_base = OTHER; note = 2'-O-methyluridine-3'-phosphate
  modified_base 7: mod_base = OTHER; note = 2'-deoxy-2'-fluoroguanosine-3'-phosphate
  modified_base 8: mod_base = OTHER; note = 2'-O-methyluridine-3'-phosphate
  modified_base 9: mod_base = OTHER; note = 2'-deoxy-2'-fluorouridine-3'-phosphate
  modified_base 10: mod_base = OTHER; note = 2'-O-methylcytidine-3'-phosphate
  modified_base 11: mod_base = OTHER; note = 2'-deoxy-2'-fluorouridine-3'-phosphate
  modified_base 12: mod_base = OTHER; note = 2'-O-methyluridine-3'-phosphate
  modified_base 13: mod_base = OTHER; note = 2'-deoxy-2'-fluoroguanosine-3'-phosphate
  modified_base 14: mod_base = OTHER; note = 2'-deoxy-2'-fluorocytidine-3'-phosphate
  modified_base 15: mod_base = OTHER; note = 2'-deoxy-2'-fluorouridine-3'-phosphate
  modified_base 16: mod_base = OTHER; note = 2'-O-methylcytidine-3'-phosphate
  modified_base 17: mod_base = OTHER; note = 2'-O-methyluridine-3'-phosphate
  modified_base 18: mod_base = OTHER; note = 2'-O-methyladenosine-3'-phosphate
  modified_base 19: mod_base = OTHER; note = 2'-deoxy-2'-fluorouridine-3'-phosphate
  modified_base 20: mod_base = OTHER; note = 2'-O-methyladenosine-3'-phosphorothioate
  modified_base 21: mod_base = OTHER; note = 2'-deoxy-2'-fluoroadenosine
aacagtgttcttgctctataa

SEQ ID NO: 377 - RNA, 21 nt, synthetic construct
  source 1..21: mol_type = other RNA
  modified_base 1: mod_base = OTHER; note = 2'-deoxy-2'-fluoroadenosine-3'-phosphate
  modified_base 2: mod_base = OTHER; note = 2'-O-methyladenosine-3'-phosphate
  modified_base 3: mod_base = OTHER; note = 2'-deoxy-2'-fluorocytidine-3'-phosphate
  modified_base 4: mod_base = OTHER; note = 2'-O-methyladenosine-3'-phosphate
  modified_base 5: mod_base = OTHER; note = 2'-O-methylguanosine-3'-phosphate
  modified_base 6: mod_base = OTHER; note = 2'-O-methyluridine-3'-phosphate
  modified_base 7: mod_base = OTHER; note = 2'-deoxy-2'-fluoroguanosine-3'-phosphate
  modified_base 8: mod_base = OTHER; note = 2'-O-methyluridine-3'-phosphate
  modified_base 9: mod_base = OTHER; note = 2'-deoxy-2'-fluorouridine-3'-phosphate
  modified_base 10: mod_base = OTHER; note = 2'-O-methylcytidine-3'-phosphate
  modified_base 11: mod_base = OTHER; note = 2'-deoxy-2'-fluorouridine-3'-phosphate
  modified_base 12: mod_base = OTHER; note = 2'-O-methyluridine-3'-phosphate
  modified_base 13: mod_base = OTHER; note = 2'-deoxy-2'-fluoroguanosine-3'-phosphate
  modified_base 14: mod_base = OTHER; note = 2'-O-methylcytidine-3'-phosphate
  modified_base 15: mod_base = OTHER; note = 2'-deoxy-2'-fluorouridine-3'-phosphate
  modified_base 16: mod_base = OTHER; note = 2'-O-methylcytidine-3'-phosphate
  modified_base 17: mod_base = OTHER; note = 2'-deoxy-2'-fluorouridine-3'-phosphate
  modified_base 18: mod_base = OTHER; note = 2'-deoxy-2'-fluoroadenosine-3'-phosphate
  modified_base 19: mod_base = OTHER; note = 2'-deoxy-2'-fluorouridine-3'-phosphate
  modified_base 20: mod_base = OTHER; note = 2'-O-methyladenosine-3'-phosphorothioate
  modified_base 21: mod_base = OTHER; note = 2'-deoxy-2'-fluoroadenosine
aacagtgttcttgctctataa

SEQ ID NO: 378 - RNA, 21 nt, synthetic construct
  source 1..21: mol_type = other RNA
  modified_base 1: mod_base = OTHER; note = 2'-deoxy-2'-fluoroadenosine-3'-phosphate
  modified_base 2: mod_base = OTHER; note = 2'-O-methyladenosine-3'-phosphate
  modified_base 3: mod_base = OTHER; note = 2'-deoxy-2'-fluorocytidine-3'-phosphate
  modified_base 4: mod_base = OTHER; note = 2'-O-methyladenosine-3'-phosphate
  modified_base 5: mod_base = OTHER; note = 2'-deoxy-2'-fluoroguanosine-3'-phosphate
  modified_base 6: mod_base = OTHER; note = 2'-O-methyluridine-3'-phosphate
  modified_base 7: mod_base = OTHER; note = 2'-deoxy-2'-fluoroguanosine-3'-phosphate
  modified_base 8: mod_base = OTHER; note = 2'-O-methyluridine-3'-phosphate
  modified_base 9: mod_base = OTHER; note = 2'-O-methyluridine-3'-phosphate
  modified_base 10: mod_base = OTHER; note = 2'-O-methylcytidine-3'-phosphate
  modified_base 11: mod_base = OTHER; note = 2'-deoxy-2'-fluorouridine-3'-phosphate
  modified_base 12: mod_base = OTHER; note = 2'-O-methyluridine-3'-phosphate
  modified_base 13: mod_base = OTHER; note = 2'-deoxy-2'-fluoroguanosine-3'-phosphate
  modified_base 14: mod_base = OTHER; note = 2'-O-methylcytidine-3'-phosphate
  modified_base 15: mod_base = OTHER; note = 2'-deoxy-2'-fluorouridine-3'-phosphate
  modified_base 16: mod_base = OTHER; note = 2'-O-methylcytidine-3'-phosphate
  modified_base 17: mod_base = OTHER; note = 2'-deoxy-2'-fluorouridine-3'-phosphate
  modified_base 18: mod_base = OTHER; note = 2'-O-methyladenosine-3'-phosphate
  modified_base 19: mod_base = OTHER; note = 2'-deoxy-2'-fluorouridine-3'-phosphate
  modified_base 20: mod_base = OTHER; note = 2'-deoxy-2'-fluoroadenosine-3'-phosphorothioate
  modified_base 21: mod_base = OTHER; note = 2'-deoxy-2'-fluoroadenosine
aacagtgttcttgctctataa

SEQ ID NO: 379 - RNA, 21 nt, synthetic construct
  source 1..21: mol_type = other RNA
  modified_base 1: mod_base = OTHER; note = 2'-deoxy-2'-fluoroadenosine-3'-phosphate
  modified_base 2: mod_base = OTHER; note = 2'-O-methyladenosine-3'-phosphate
  modified_base 3: mod_base = OTHER; note = 2'-O-methylcytidine-3'-phosphate
  modified_base 4: mod_base = OTHER; note = 2'-O-methyladenosine-3'-phosphate
  modified_base 5: mod_base = OTHER; note = 2'-deoxy-2'-fluoroguanosine-3'-phosphate
  modified_base 6: mod_base = OTHER; note = 2'-O-methyluridine-3'-phosphate
  modified_base 7: mod_base = OTHER; note = 2'-O-methylguanosine-3'-phosphate
  modified_base 8: mod_base = OTHER; note = 2'-O-methyluridine-3'-phosphate
  modified_base 9: mod_base = OTHER; note = 2'-deoxy-2'-fluorouridine-3'-phosphate
  modified_base 10: mod_base = OTHER; note = 2'-O-methylcytidine-3'-phosphate
  modified_base 11: mod_base = OTHER; note = 2'-deoxy-2'-fluorouridine-3'-phosphate
  modified_base 12: mod_base = OTHER; note = 2'-O-methyluridine-3'-phosphate
  modified_base 13: mod_base = OTHER; note = 2'-deoxy-2'-fluoroguanosine-3'-phosphate
  modified_base 14: mod_base = OTHER; note = 2'-O-methylcytidine-3'-phosphate
  modified_base 15: mod_base = OTHER; note = 2'-deoxy-2'-fluorouridine-3'-phosphate
  modified_base 16: mod_base = OTHER; note = 2'-O-methylcytidine-3'-phosphate
  modified_base 17: mod_base = OTHER; note = 2'-deoxy-2'-fluorouridine-3'-phosphate
  modified_base 18: mod_base = OTHER; note = 2'-O-methyladenosine-3'-phosphate
  modified_base 19: mod_base = OTHER; note = 2'-deoxy-2'-fluorouridine-3'-phosphate
  modified_base 20: mod_base = OTHER; note = 2'-O-methyladenosine-3'-phosphorothioate
  modified_base 21: mod_base = OTHER; note = 2'-deoxy-2'-fluoroadenosine
aacagtgttcttgctctataa

SEQ ID NO: 380 - RNA, 21 nt, synthetic construct
  source 1..21: mol_type = other RNA
  modified_base 1: mod_base = OTHER; note = 2'-deoxy-2'-fluoroadenosine-3'-phosphate
  modified_base 2: mod_base = OTHER; note = 2'-O-methyladenosine-3'-phosphate
  modified_base 3: mod_base = OTHER; note = 2'-deoxy-2'-fluorocytidine-3'-phosphate
  modified_base 4: mod_base = OTHER; note = 2'-O-methyladenosine-3'-phosphate
  modified_base 5: mod_base = OTHER; note = 2'-deoxy-2'-fluoroguanosine-3'-phosphate
  modified_base 6: mod_base = OTHER; note = 2'-O-methyluridine-3'-phosphate
  modified_base 7: mod_base = OTHER; note = 2'-deoxy-2'-fluoroguanosine-3'-phosphate
  modified_base 8: mod_base = OTHER; note = 2'-O-methyluridine-3'-phosphate
  modified_base 9: mod_base = OTHER; note = 2'-deoxy-2'-fluorouridine-3'-phosphate
  modified_base 10: mod_base = OTHER; note = 2'-O-methylcytidine-3'-phosphate
  modified_base 11: mod_base = OTHER; note = 2'-O-methyluridine-3'-phosphate
  modified_base 12: mod_base = OTHER; note = 2'-O-methyluridine-3'-phosphate
  modified_base 13: mod_base = OTHER; note = 2'-deoxy-2'-fluoroguanosine-3'-phosphate
  modified_base 14: mod_base = OTHER; note = 2'-deoxy-2'-fluorocytidine-3'-phosphate
  modified_base 15: mod_base = OTHER; note = 2'-deoxy-2'-fluorouridine-3'-phosphate
  modified_base 16: mod_base = OTHER; note = 2'-O-methylcytidine-3'-phosphate
  modified_base 17: mod_base = OTHER; note = 2'-deoxy-2'-fluorouridine-3'-phosphate
  modified_base 18: mod_base = OTHER; note = 2'-O-methyladenosine-3'-phosphate
  modified_base 19: mod_base = OTHER; note = 2'-deoxy-2'-fluorouridine-3'-phosphate
  modified_base 20: mod_base = OTHER; note = 2'-O-methyladenosine-3'-phosphorothioate
  modified_base 21: mod_base = OTHER; note = 2'-deoxy-2'-fluoroadenosine
aacagtgttcttgctctataa

SEQ ID NO: 381 - RNA, 21 nt, synthetic construct
  source 1..21: mol_type = other RNA
  modified_base 1: mod_base = OTHER; note = 2'-deoxy-2'-fluoroadenosine-3'-phosphate
  modified_base 2: mod_base = OTHER; note = 2'-O-methyladenosine-3'-phosphate
  modified_base 3: mod_base = OTHER; note = 2'-deoxy-2'-fluorocytidine-3'-phosphate
  modified_base 4: mod_base = OTHER; note = 2'-O-methyladenosine-3'-phosphate
  modified_base 5: mod_base = OTHER; note = 2'-deoxy-2'-fluoroguanosine-3'-phosphate
  modified_base 6: mod_base = OTHER; note = 2'-O-methyluridine-3'-phosphate
  modified_base 7: mod_base = OTHER; note = 2'-deoxy-2'-fluoroguanosine-3'-phosphate
  modified_base 8: mod_base = OTHER; note = 2'-O-methyluridine-3'-phosphate
  modified_base 9: mod_base = OTHER; note = 2'-deoxy-2'-fluorouridine-3'-phosphate
  modified_base 10: mod_base = OTHER; note = 2'-O-methylcytidine-3'-phosphate
  modified_base 11: mod_base = OTHER; note = 2'-O-methyluridine-3'-phosphate
  modified_base 12: mod_base = OTHER; note = 2'-O-methyluridine-3'-phosphate
  modified_base 13: mod_base = OTHER; note = 2'-deoxy-2'-fluoroguanosine-3'-phosphate
  modified_base 14: mod_base = OTHER; note = 2'-deoxy-2'-fluorocytidine-3'-phosphate
  modified_base 15: mod_base = OTHER; note = 2'-deoxy-2'-fluorouridine-3'-phosphate
  modified_base 16: mod_base = OTHER; note = 2'-O-methylcytidine-3'-phosphate
  modified_base 17: mod_base = OTHER; note = 2'-deoxy-2'-fluorouridine-3'-phosphate
  modified_base 18: mod_base = OTHER; note = 2'-O-methyladenosine-3'-phosphate
  modified_base 19: mod_base = OTHER; note = 2'-deoxy-2'-fluorouridine-3'-phosphate
  modified_base 20: mod_base = OTHER; note = 2'-O-methyladenosine-3'-phosphorothioate
  modified_base 21: mod_base = OTHER; note = 2'-deoxy-2'-fluoroadenosine
aacagtgttcttgctctataa

SEQ ID NO: 382 - RNA, 21 nt, synthetic construct
  source 1..21: mol_type = other RNA
  modified_base 1: mod_base = OTHER; note = 2'-deoxy-2'-fluoroadenosine-3'-phosphate
  modified_base 2: mod_base = OTHER; note = 2'-O-methyladenosine-3'-phosphate
  modified_base 3: mod_base = OTHER; note = 2'-deoxy-2'-fluorocytidine-3'-phosphate
  modified_base 4: mod_base = OTHER; note = 2'-O-methyladenosine-3'-phosphate
  modified_base 5: mod_base = OTHER; note = 2'-deoxy-2'-fluoroguanosine-3'-phosphate
  modified_base 6: mod_base = OTHER; note = 2'-O-methyluridine-3'-phosphate
  modified_base 7: mod_base = OTHER; note = 2'-deoxy-2'-fluoroguanosine-3'-phosphate
  modified_base 8: mod_base = OTHER; note = 2'-O-methyluridine-3'-phosphate
  modified_base 9: mod_base = OTHER; note = 2'-deoxy-2'-fluorouridine-3'-phosphate
  modified_base 10: mod_base = OTHER; note = 2'-O-methylcytidine-3'-phosphate
  modified_base 11: mod_base = OTHER; note = 2'-deoxy-2'-fluorouridine-3'-phosphate
  modified_base 12: mod_base = OTHER; note = 2'-O-methyluridine-3'-phosphate
  modified_base 13: mod_base = OTHER; note = 2'-deoxy-2'-fluoroguanosine-3'-phosphate
  modified_base 14: mod_base = OTHER; note = 2'-O-methylcytidine-3'-phosphate
  modified_base 15: mod_base = OTHER; note = 2'-deoxy-2'-fluorouridine-3'-phosphate
  modified_base 16: mod_base = OTHER; note = 2'-deoxy-2'-fluorocytidine-3'-phosphate
  modified_base 17: mod_base = OTHER; note = 2'-deoxy-2'-fluorouridine-3'-phosphate
  modified_base 18: mod_base = OTHER; note = 2'-O-methyladenosine-3'-phosphate
  modified_base 19: mod_base = OTHER; note = 2'-O-methyluridine-3'-phosphate
  modified_base 20: mod_base = OTHER; note = 2'-O-methyladenosine-3'-phosphorothioate
  modified_base 21: mod_base = OTHER; note = 2'-deoxy-2'-fluoroadenosine
aacagtgttcttgctctataa

SEQ ID NO: 383 - RNA, 21 nt, synthetic construct
  source 1..21: mol_type = other RNA
  modified_base 1: mod_base = OTHER; note = 2'-deoxy-2'-fluoroadenosine-3'-phosphate
  modified_base 2: mod_base = OTHER; note = 2'-O-methyladenosine-3'-phosphate
  modified_base 3: mod_base = OTHER; note = 2'-deoxy-2'-fluorocytidine-3'-phosphate
  modified_base 4: mod_base = OTHER; note = 2'-O-methyladenosine-3'-phosphate
  modified_base 5: mod_base = OTHER; note = 2'-deoxy-2'-fluoroguanosine-3'-phosphate
  modified_base 6: mod_base = OTHER; note = 2'-O-methyluridine-3'-phosphate
  modified_base 7: mod_base = OTHER; note = 2'-O-methylguanosine-3'-phosphate
  modified_base 8: mod_base = OTHER; note = 2'-O-methyluridine-3'-phosphate
  modified_base 9: mod_base = OTHER; note = 2'-deoxy-2'-fluorouridine-3'-phosphate
  modified_base 10: mod_base = OTHER; note = 2'-O-methylcytidine-3'-phosphate
  modified_base 11: mod_base = OTHER; note = 2'-deoxy-2'-fluorouridine-3'-phosphate
  modified_base 12: mod_base = OTHER; note = 2'-O-methyluridine-3'-phosphate
  modified_base 13: mod_base = OTHER; note = 2'-deoxy-2'-fluoroguanosine-3'-phosphate
  modified_base 14: mod_base = OTHER; note = 2'-O-methylcytidine-3'-phosphate
  modified_base 15: mod_base = OTHER; note = 2'-deoxy-2'-fluorouridine-3'-phosphate
  modified_base 16: mod_base = OTHER; note = 2'-O-methylcytidine-3'-phosphate
  modified_base 17: mod_base = OTHER; note = 2'-deoxy-2'-fluorouridine-3'-phosphate
  modified_base 18: mod_base = OTHER; note = 2'-O-methyladenosine-3'-phosphate
  modified_base 19: mod_base = OTHER; note = 2'-deoxy-2'-fluorouridine-3'-phosphate
  modified_base 20: mod_base = OTHER; note = 2'-deoxy-2'-fluoroadenosine-3'-phosphorothioate
  modified_base 21: mod_base = OTHER; note = 2'-deoxy-2'-fluoroadenosine
aacagtgttcttgctctataa

SEQ ID NO: 384 - RNA, 21 nt, synthetic construct
  source 1..21: mol_type = other RNA
  modified_base 1: mod_base = OTHER; note = 2'-deoxy-2'-fluoroadenosine-3'-phosphate
  modified_base 2: mod_base = OTHER; note = 2'-O-methyladenosine-3'-phosphate
  modified_base 3: mod_base = OTHER; note = 2'-deoxy-2'-fluorocytidine-3'-phosphate
  modified_base 4: mod_base = OTHER; note = 2'-O-methyladenosine-3'-phosphate
  modified_base 5: mod_base = OTHER; note = 2'-deoxy-2'-fluoroguanosine-3'-phosphate
  modified_base 6: mod_base = OTHER; note = 2'-O-methyluridine-3'-phosphate
  modified_base 7: mod_base = OTHER; note = 2'-deoxy-2'-fluoroguanosine-3'-phosphate
  modified_base 8: mod_base = OTHER; note = 2'-O-methyluridine-3'-phosphate
  modified_base 9: mod_base = OTHER; note = 2'-O-methyluridine-3'-phosphate
  modified_base 10: mod_base = OTHER; note = 2'-O-methylcytidine-3'-phosphate
  modified_base 11: mod_base = OTHER; note = 2'-deoxy-2'-fluorouridine-3'-phosphate
  modified_base 12: mod_base = OTHER; note = 2'-O-methyluridine-3'-phosphate
  modified_base 13: mod_base = OTHER; note = 2'-deoxy-2'-fluoroguanosine-3'-phosphate
  modified_base 14: mod_base = OTHER; note = 2'-deoxy-2'-fluorocytidine-3'-phosphate
  modified_base 15: mod_base = OTHER; note = 2'-deoxy-2'-fluorouridine-3'-phosphate
  modified_base 16: mod_base = OTHER; note = 2'-O-methylcytidine-3'-phosphate
  modified_base 17: mod_base = OTHER; note = 2'-deoxy-2'-fluorouridine-3'-phosphate
  modified_base 18: mod_base = OTHER; note = 2'-O-methyladenosine-3'-phosphate
  modified_base 19: mod_base = OTHER; note = 2'-deoxy-2'-fluorouridine-3'-phosphate
  modified_base 20: mod_base = OTHER; note = 2'-O-methyladenosine-3'-phosphorothioate
  modified_base 21: mod_base = OTHER; note = 2'-deoxy-2'-fluoroadenosine
aacagtgttcttgctctataa

SEQ ID NO: 385 - RNA, 21 nt, synthetic construct
  source 1..21: mol_type = other RNA
  modified_base 1: mod_base = OTHER; note = 2'-O-methyladenosine-3'-phosphate
  modified_base 2: mod_base = OTHER; note = 2'-O-methyladenosine-3'-phosphate
  modified_base 3: mod_base = OTHER; note = 2'-deoxy-2'-fluorocytidine-3'-phosphate
  modified_base 4: mod_base = OTHER; note = 2'-O-methyladenosine-3'-phosphate
  modified_base 5: mod_base = OTHER; note = 2'-deoxy-2'-fluoroguanosine-3'-phosphate
  modified_base 6: mod_base = OTHER; note = 2'-O-methyluridine-3'-phosphate
  modified_base 7: mod_base = OTHER; note = 2'-deoxy-2'-fluoroguanosine-3'-phosphate
  modified_base 8: mod_base = OTHER; note = 2'-O-methyluridine-3'-phosphate
  modified_base 9: mod_base = OTHER; note = 2'-deoxy-2'-fluorouridine-3'-phosphate
  modified_base 10: mod_base = OTHER; note = 2'-O-methylcytidine-3'-phosphate
  modified_base 11: mod_base = OTHER; note = 2'-deoxy-2'-fluorouridine-3'-phosphate
  modified_base 12: mod_base = OTHER; note = 2'-O-methyluridine-3'-phosphate
  modified_base 13: mod_base = OTHER; note = 2'-deoxy-2'-fluoroguanosine-3'-phosphate
  modified_base 14: mod_base = OTHER; note = 2'-O-methylcytidine-3'-phosphate
  modified_base 15: mod_base = OTHER; note = 2'-deoxy-2'-fluorouridine-3'-phosphate
  modified_base 16: mod_base = OTHER; note = 2'-O-methylcytidine-3'-phosphate
  modified_base 17: mod_base = OTHER; note = 2'-deoxy-2'-fluorouridine-3'-phosphate
  modified_base 18: mod_base = OTHER; note = 2'-deoxy-2'-fluoroadenosine-3'-phosphate
  modified_base 19: mod_base = OTHER; note = 2'-deoxy-2'-fluorouridine-3'-phosphate
  modified_base 20: mod_base = OTHER; note = 2'-O-methyladenosine-3'-phosphorothioate
  modified_base 21: mod_base = OTHER; note = 2'-deoxy-2'-fluoroadenosine
aacagtgttcttgctctataa

SEQ ID NO: 386 - RNA, 21 nt, synthetic construct
  source 1..21: mol_type = other RNA
  modified_base 1: mod_base = OTHER; note = 2'-deoxy-2'-fluoroadenosine-3'-phosphate
  modified_base 2: mod_base = OTHER; note = 2'-O-methyladenosine-3'-phosphate
  modified_base 3: mod_base = OTHER; note = 2'-deoxy-2'-fluorocytidine-3'-phosphate
  modified_base 4: mod_base = OTHER; note = 2'-O-methyladenosine-3'-phosphate
  modified_base 5: mod_base = OTHER; note = 2'-O-methylguanosine-3'-phosphate
  modified_base 6: mod_base = OTHER; note = 2'-O-methyluridine-3'-phosphate
  modified_base 7: mod_base = OTHER; note = 2'-deoxy-2'-fluoroguanosine-3'-phosphate
  modified_base 8: mod_base = OTHER; note = 2'-O-methyluridine-3'-phosphate
  modified_base 9: mod_base = OTHER; note = 2'-deoxy-2'-fluorouridine-3'-phosphate
  modified_base 10: mod_base = OTHER; note = 2'-O-methylcytidine-3'-phosphate
  modified_base 11: mod_base = OTHER; note = 2'-deoxy-2'-fluorouridine-3'-phosphate
  modified_base 12: mod_base = OTHER; note = 2'-O-methyluridine-3'-phosphate
  modified_base 13: mod_base = OTHER; note = 2'-deoxy-2'-fluoroguanosine-3'-phosphate
  modified_base 14: mod_base = OTHER; note = 2'-O-methylcytidine-3'-phosphate
  modified_base 15: mod_base = OTHER; note = 2'-deoxy-2'-fluorouridine-3'-phosphate
  modified_base 16: mod_base = OTHER; note = 2'-O-methylcytidine-3'-phosphate
  modified_base 17: mod_base = OTHER; note = 2'-deoxy-2'-fluorouridine-3'-phosphate
  modified_base 18: mod_base = OTHER; note = 2'-O-methyladenosine-3'-phosphate
  modified_base 19: mod_base = OTHER; note = 2'-deoxy-2'-fluorouridine-3'-phosphate
  modified_base 20: mod_base = OTHER; note = 2'-deoxy-2'-fluoroadenosine-3'-phosphorothioate
  modified_base 21: mod_base = OTHER; note = 2'-deoxy-2'-fluoroadenosine
aacagtgttcttgctctataa

SEQ ID NO: 387 - RNA, 21 nt, synthetic construct
  source 1..21: mol_type = other RNA
  modified_base 1: mod_base = OTHER; note = 2'-deoxy-2'-fluoroadenosine-3'-phosphate
  modified_base 2: mod_base = OTHER; note = 2'-O-methyladenosine-3'-phosphate
  modified_base 3: mod_base = OTHER; note = 2'-deoxy-2'-fluorocytidine-3'-phosphate
  modified_base 4: mod_base = OTHER; note = 2'-O-methyladenosine-3'-phosphate
  modified_base 5: mod_base = OTHER; note = 2'-deoxy-2'-fluoroguanosine-3'-phosphate
  modified_base 6: mod_base = OTHER; note = 2'-O-methyluridine-3'-phosphate
  modified_base 7: mod_base = OTHER; note = 2'-O-methylguanosine-3'-phosphate
  modified_base 8: mod_base = OTHER; note = 2'-O-methyluridine-3'-phosphate
  modified_base 9: mod_base = OTHER; note = 2'-deoxy-2'-fluorouridine-3'-phosphate
  modified_base 10: mod_base = OTHER; note = 2'-O-methylcytidine-3'-phosphate
  modified_base 11: mod_base = OTHER; note = 2'-deoxy-2'-fluorouridine-3'-phosphate
  modified_base 12: mod_base = OTHER; note = 2'-O-methyluridine-3'-phosphate
  modified_base 13: mod_base = OTHER; note = 2'-deoxy-2'-fluoroguanosine-3'-phosphate
  modified_base 14: mod_base = OTHER; note = 2'-deoxy-2'-fluorocytidine-3'-phosphate
  modified_base 15: mod_base = OTHER; note = 2'-deoxy-2'-fluorouridine-3'-phosphate
  modified_base 16: mod_base = OTHER; note = 2'-O-methylcytidine-3'-phosphate
  modified_base 17: mod_base = OTHER; note = 2'-deoxy-2'-fluorouridine-3'-phosphate
  modified_base 18: mod_base = OTHER; note = 2'-O-methyladenosine-3'-phosphate
  modified_base 19: mod_base = OTHER; note = 2'-deoxy-2'-fluorouridine-3'-phosphate
  modified_base 20: mod_base = OTHER; note = 2'-O-methyladenosine-3'-phosphorothioate
  modified_base 21: mod_base = OTHER; note = 2'-deoxy-2'-fluoroadenosine
aacagtgttcttgctctataa

SEQ ID NO: 388 - RNA, 21 nt, synthetic construct
  source 1..21: mol_type = other RNA
  modified_base 1: mod_base = OTHER; note = 2'-deoxy-2'-fluoroadenosine-3'-phosphate
  modified_base 2: mod_base = OTHER; note = 2'-O-methyladenosine-3'-phosphate
  modified_base 3: mod_base = OTHER; note = 2'-deoxy-2'-fluorocytidine-3'-phosphate
  modified_base 4: mod_base = OTHER; note = 2'-O-methyladenosine-3'-phosphate
  modified_base 5: mod_base = OTHER; note = 2'-deoxy-2'-fluoroguanosine-3'-phosphate
  modified_base 6: mod_base = OTHER; note = 2'-O-methyluridine-3'-phosphate
  modified_base 7: mod_base = OTHER; note = 2'-deoxy-2'-fluoroguanosine-3'-phosphate
  modified_base 8: mod_base = OTHER; note = 2'-O-methyluridine-3'-phosphate
  modified_base 9: mod_base = OTHER; note = 2'-deoxy-2'-fluorouridine-3'-phosphate
  modified_base 10: mod_base = OTHER; note = 2'-O-methylcytidine-3'-phosphate
  modified_base 11: mod_base = OTHER; note = 2'-O-methyluridine-3'-phosphate
  modified_base 12: mod_base = OTHER; note = 2'-O-methyluridine-3'-phosphate
  modified_base 13: mod_base = OTHER; note = 2'-deoxy-2'-fluoroguanosine-3'-phosphate
  modified_base 14: mod_base = OTHER; note = 2'-O-methylcytidine-3'-phosphate
  modified_base 15: mod_base = OTHER; note = 2'-deoxy-2'-fluorouridine-3'-phosphate
  modified_base 16: mod_base = OTHER; note = 2'-deoxy-2'-fluorocytidine-3'-phosphate
  modified_base 17: mod_base = OTHER; note = 2'-deoxy-2'-fluorouridine-3'-phosphate
  modified_base 18: mod_base = OTHER; note = 2'-O-methyladenosine-3'-phosphate
  modified_base 19: mod_base = OTHER; note = 2'-deoxy-2'-fluorouridine-3'-phosphate
  modified_base 20: mod_base = OTHER; note = 2'-O-methyladenosine-3'-phosphorothioate
  modified_base 21: mod_base = OTHER; note = 2'-deoxy-2'-fluoroadenosine
aacagtgttcttgctctataa

SEQ ID NO: 389 - RNA, 21 nt, synthetic construct
  source 1..21: mol_type = other RNA
  modified_base 1: mod_base = OTHER; note = 2'-deoxy-2'-fluoroadenosine-3'-phosphate
  modified_base 2: mod_base = OTHER; note = 2'-O-methyladenosine-3'-phosphate
  modified_base 3: mod_base = OTHER; note = 2'-deoxy-2'-fluorocytidine-3'-phosphate
  modified_base 4: mod_base = OTHER; note = 2'-O-methyladenosine-3'-phosphate
  modified_base 5: mod_base = OTHER; note = 2'-deoxy-2'-fluoroguanosine-3'-phosphate
  modified_base 6: mod_base = OTHER; note = 2'-O-methyluridine-3'-phosphate
  modified_base 7: mod_base = OTHER; note = 2'-deoxy-2'-fluoroguanosine-3'-phosphate
  modified_base 8: mod_base = OTHER; note = 2'-O-methyluridine-3'-phosphate
  modified_base 9: mod_base = OTHER; note = 2'-deoxy-2'-fluorouridine-3'-phosphate
  modified_base 10: mod_base = OTHER; note = 2'-O-methylcytidine-3'-phosphate
  modified_base 11: mod_base = OTHER; note = 2'-deoxy-2'-fluorouridine-3'-phosphate
  modified_base 12: mod_base = OTHER; note = 2'-O-methyluridine-3'-phosphate
  modified_base 13: mod_base = OTHER; note = 2'-deoxy-2'-fluoroguanosine-3'-phosphate
  modified_base 14: mod_base = OTHER; note = 2'-O-methylcytidine-3'-phosphate
  modified_base 15: mod_base = OTHER; note = 2'-deoxy-2'-fluorouridine-3'-phosphate
  modified_base 16: mod_base = OTHER; note = 2'-O-methylcytidine-3'-phosphate
  modified_base 17: mod_base = OTHER; note = 2'-deoxy-2'-fluorouridine-3'-phosphate
  modified_base 18: mod_base = OTHER; note = 2'-deoxy-2'-fluoroadenosine-3'-phosphate
  modified_base 19: mod_base = OTHER; note = 2'-deoxy-2'-fluorouridine-3'-phosphate
  modified_base 20: mod_base = OTHER; note = 2'-O-methyladenosine-3'-phosphorothioate
  modified_base 21: mod_base = OTHER; note = 2'-deoxy-2'-fluoroadenosine
aacagtgttcttgctctataa

SEQ ID NO: 390 - RNA, 21 nt, synthetic construct
  source 1..21: mol_type = other RNA
  modified_base 1: mod_base = OTHER; note = 2'-deoxy-2'-fluoroadenosine-3'-phosphate
  modified_base 2: mod_base = OTHER; note = 2'-O-methyladenosine-3'-phosphate
  modified_base 3: mod_base = OTHER; note = 2'-O-methylcytidine-3'-phosphate
  modified_base 4: mod_base = OTHER; note = 2'-O-methyladenosine-3'-phosphate
  modified_base 5: mod_base = OTHER; note = 2'-deoxy-2'-fluoroguanosine-3'-phosphate
  modified_base 6: mod_base = OTHER; note = 2'-O-methyluridine-3'-phosphate
  modified_base 7: mod_base = OTHER; note = 2'-deoxy-2'-fluoroguanosine-3'-phosphate
  modified_base 8: mod_base = OTHER; note = 2'-O-methyluridine-3'-phosphate
  modified_base 9: mod_base = OTHER; note = 2'-deoxy-2'-fluorouridine-3'-phosphate
  modified_base 10: mod_base = OTHER; note = 2'-O-methylcytidine-3'-phosphate
  modified_base 11: mod_base = OTHER; note = 2'-deoxy-2'-fluorouridine-3'-phosphate
  modified_base 12: mod_base = OTHER; note = 2'-O-methyluridine-3'-phosphate
  modified_base 13: mod_base = OTHER; note = 2'-deoxy-2'-fluoroguanosine-3'-phosphate
  modified_base 14: mod_base = OTHER; note = 2'-O-methylcytidine-3'-phosphate
  modified_base 15: mod_base = OTHER; note = 2'-deoxy-2'-fluorouridine-3'-phosphate
  modified_base 16: mod_base = OTHER; note = 2'-O-methylcytidine-3'-phosphate
  modified_base 17: mod_base = OTHER; note = 2'-deoxy-2'-fluorouridine-3'-phosphate
  modified_base 18: mod_base = OTHER; note = 2'-O-methyladenosine-3'-phosphate
  modified_base 19: mod_base = OTHER; note = 2'-deoxy-2'-fluorouridine-3'-phosphate
  modified_base 20: mod_base = OTHER; note = 2'-deoxy-2'-fluoroadenosine-3'-phosphorothioate
  modified_base 21: mod_base = OTHER; note = 2'-deoxy-2'-fluoroadenosine
aacagtgttcttgctctataa

SEQ ID NO: 391 - DNA, 21 bp, synthetic construct
  source 1..21: mol_type = other DNA
  modified_base 1: mod_base = OTHER; note = 2'-O-methyladenosine-3'-phosphate
  modified_base 2: mod_base = OTHER; note = 2'-O-methyladenosine-3'-phosphate
  modified_base 3: mod_base = OTHER; note = 2'-O-methylcytidine-3'-phosphate
  modified_base 4: mod_base = OTHER; note = 2'-O-methyladenosine-3'-phosphate
  modified_base 5: mod_base = OTHER; note = 2'-O-methylguanosine-3'-phosphate
  modified_base 6: mod_base = OTHER; note = 2'-O-methyluridine-3'-phosphate
  modified_base 7: mod_base = OTHER; note = 2'-O-methylguanosine-3'-phosphate
  modified_base 8: mod_base = OTHER; note = 2'-O-methyluridine-3'-phosphate
  modified_base 9: mod_base = OTHER; note = 2'-O-methyluridine-3'-phosphate
  modified_base 10: mod_base = OTHER; note = 2'-O-methylcytidine-3'-phosphate
  modified_base 11: mod_base = OTHER; note = 2'-deoxy-2'-fluorouridine-3'-phosphate
  modified_base 12: mod_base = OTHER; note = 2'-O-methyluridine-3'-phosphate
  modified_base 13: mod_base = OTHER; note = 2'-deoxy-2'-fluoroguanosine-3'-phosphate
  modified_base 14: mod_base = OTHER; note = 2'-O-methylcytidine-3'-phosphate
  modified_base 15: mod_base = OTHER; note = uridine-3'-phosphate
  modified_base 16: mod_base = OTHER; note = 2'-O-methylcytidine-3'-phosphate
  modified_base 17: mod_base = OTHER; note = uridine-3'-phosphate
  modified_base 18: mod_base = OTHER; note = 2'-O-methyladenosine-3'-phosphate
  modified_base 19: mod_base = OTHER; note = 2'-O-methyluridine-3'-phosphate
  modified_base 20: mod_base = OTHER; note = 2'-deoxyadenosine-3'-phosphorothioate
  modified_base 21: mod_base = OTHER; note = 2'-O-methyladenosine
  misc_feature 1..19: note = RNA
  misc_feature 21: note = RNA
  misc_feature 20: note = DNA
aacagtgttcttgctctataa

SEQ ID NO: 392 - RNA, 21 nt, synthetic construct
  source 1..21: mol_type = other RNA
  modified_base 1: mod_base = OTHER; note = 2'-deoxy-2'-fluoroadenosine-3'-phosphate
  modified_base 2: mod_base = OTHER; note = 2'-O-methyladenosine-3'-phosphate
  modified_base 3: mod_base = OTHER; note = 2'-deoxy-2'-fluorocytidine-3'-phosphate
  modified_base 4: mod_base = OTHER; note = 2'-O-methyladenosine-3'-phosphate
  modified_base 5: mod_base = OTHER; note = 2'-O-methylguanosine-3'-phosphate
  modified_base 6: mod_base = OTHER; note = 2'-O-methyluridine-3'-phosphate
  modified_base 7: mod_base = OTHER; note = 2'-deoxy-2'-fluoroguanosine-3'-phosphate
  modified_base 8: mod_base = OTHER; note = 2'-O-methyluridine-3'-phosphate
  modified_base 9: mod_base = OTHER; note = 2'-deoxy-2'-fluorouridine-3'-phosphate
  modified_base 10: mod_base = OTHER; note = 2'-O-methylcytidine-3'-phosphate
  modified_base 11: mod_base = OTHER; note = 2'-deoxy-2'-fluorouridine-3'-phosphate
  modified_base 12: mod_base = OTHER; note = 2'-O-methyluridine-3'-phosphate
  modified_base 13: mod_base = OTHER; note = 2'-deoxy-2'-fluoroguanosine-3'-phosphate
  modified_base 14: mod_base = OTHER; note = 2'-deoxy-2'-fluorocytidine-3'-phosphate
  modified_base 15: mod_base = OTHER; note = 2'-deoxy-2'-fluorouridine-3'-phosphate
  modified_base 16: mod_base = OTHER; note = 2'-O-methylcytidine-3'-phosphate
  modified_base 17: mod_base = OTHER; note = 2'-deoxy-2'-fluorouridine-3'-phosphate
  modified_base 18: mod_base = OTHER; note = 2'-O-methyladenosine-3'-phosphate
  modified_base 19: mod_base = OTHER; note = 2'-deoxy-2'-fluorouridine-3'-phosphate
  modified_base 20: mod_base = OTHER; note = 2'-O-methyladenosine-3'-phosphorothioate
  modified_base 21: mod_base = OTHER; note = 2'-deoxy-2'-fluoroadenosine
aacagtgttcttgctctataa

SEQ ID NO: 393 - RNA, 21 nt, synthetic construct
  source 1..21: mol_type = other RNA
  modified_base 1: mod_base = OTHER; note = 2'-deoxy-2'-fluoroadenosine-3'-phosphate
  modified_base 2: mod_base = OTHER; note = 2'-O-methyladenosine-3'-phosphate
  modified_base 3: mod_base = OTHER; note = 2'-deoxy-2'-fluorocytidine-3'-phosphate
  modified_base 4: mod_base = OTHER; note = 2'-O-methyladenosine-3'-phosphate
  modified_base 5: mod_base = OTHER; note = 2'-deoxy-2'-fluoroguanosine-3'-phosphate
  modified_base 6: mod_base = OTHER; note = 2'-O-methyluridine-3'-phosphate
  modified_base 7: mod_base = OTHER; note = 2'-deoxy-2'-fluoroguanosine-3'-phosphate
  modified_base 8: mod_base = OTHER; note = 2'-O-methyluridine-3'-phosphate
  modified_base 9: mod_base = OTHER; note = 2'-O-methyluridine-3'-phosphate
  modified_base 10: mod_base = OTHER; note = 2'-O-methylcytidine-3'-phosphate
  modified_base 11: mod_base = OTHER; note = 2'-deoxy-2'-fluorouridine-3'-phosphate
  modified_base 12: mod_base = OTHER; note = 2'-O-methyluridine-3'-phosphate
  modified_base 13: mod_base = OTHER; note = 2'-deoxy-2'-fluoroguanosine-3'-phosphate
  modified_base 14: mod_base = OTHER; note = 2'-O-methylcytidine-3'-phosphate
  modified_base 15: mod_base = OTHER; note = 2'-deoxy-2'-fluorouridine-3'-phosphate
  modified_base 16: mod_base = OTHER; note = 2'-deoxy-2'-fluorocytidine-3'-phosphate
  modified_base 17: mod_base = OTHER; note = 2'-deoxy-2'-fluorouridine-3'-phosphate
  modified_base 18: mod_base = OTHER; note = 2'-O-methyladenosine-3'-phosphate
  modified_base 19: mod_base = OTHER; note = 2'-deoxy-2'-fluorouridine-3'-phosphate
  modified_base 20: mod_base = OTHER; note = 2'-O-methyladenosine-3'-phosphorothioate
  modified_base 21: mod_base = OTHER; note = 2'-deoxy-2'-fluoroadenosine
aacagtgttcttgctctataa

SEQ ID NO: 394 - RNA, 21 nt, synthetic construct
  source 1..21: mol_type = other RNA
  modified_base 1: mod_base = OTHER; note = 2'-deoxy-2'-fluoroadenosine-3'-phosphate
  modified_base 2: mod_base = OTHER; note = 2'-O-methyladenosine-3'-phosphate
  modified_base 3: mod_base = OTHER; note = 2'-deoxy-2'-fluorocytidine-3'-phosphate
  modified_base 4: mod_base = OTHER; note = 2'-O-methyladenosine-3'-phosphate
  modified_base 5: mod_base = OTHER; note = 2'-deoxy-2'-fluoroguanosine-3'-phosphate
  modified_base 6: mod_base = OTHER; note = 2'-O-methyluridine-3'-phosphate
  modified_base 7: mod_base = OTHER; note = 2'-deoxy-2'-fluoroguanosine-3'-phosphate
  modified_base 8: mod_base = OTHER; note = 2'-O-methyluridine-3'-phosphate
  modified_base 9: mod_base = OTHER; note = 2'-deoxy-2'-fluorouridine-3'-phosphate
  modified_base 10: mod_base = OTHER; note = 2'-O-methylcytidine-3'-phosphate
  modified_base 11: mod_base = OTHER; note = 2'-deoxy-2'-fluorouridine-3'-phosphate
  modified_base 12: mod_base = OTHER; note = 2'-O-methyluridine-3'-phosphate
  modified_base 13: mod_base = OTHER; note = 2'-deoxy-2'-fluoroguanosine-3'-phosphate
  modified_base 14: mod_base = OTHER; note = 2'-O-methylcytidine-3'-phosphate
  modified_base 15: mod_base = OTHER; note = 2'-deoxy-2'-fluorouridine-3'-phosphate
  modified_base 16: mod_base = OTHER; note = 2'-O-methylcytidine-3'-phosphate
  modified_base 17: mod_base = OTHER; note = 2'-O-methyluridine-3'-phosphate
  modified_base 18: mod_base = OTHER; note = 2'-O-methyladenosine-3'-phosphate
  modified_base 19: mod_base = OTHER; note = 2'-deoxy-2'-fluorouridine-3'-phosphate
  modified_base 20: mod_base = OTHER; note = 2'-deoxy-2'-fluoroadenosine-3'-phosphorothioate
  modified_base 21: mod_base = OTHER; note = 2'-deoxy-2'-fluoroadenosine
aacagtgttcttgctctataa

SEQ ID NO: 395 - RNA, 21 nt, synthetic construct
  source 1..21: mol_type = other RNA
  modified_base 1: mod_base = OTHER; note = 2'-O-methyladenosine-3'-phosphate
  modified_base 2: mod_base = OTHER; note = 2'-O-methyladenosine-3'-phosphate
  modified_base 3: mod_base = OTHER; note = 2'-deoxy-2'-fluorocytidine-3'-phosphate
  modified_base 4: mod_base = OTHER; note = 2'-O-methyladenosine-3'-phosphate
  modified_base 5: mod_base = OTHER; note = 2'-deoxy-2'-fluoroguanosine-3'-phosphate
  modified_base 6: mod_base = OTHER; note = 2'-O-methyluridine-3'-phosphate
  modified_base 7: mod_base = OTHER; note = 2'-deoxy-2'-fluoroguanosine-3'-phosphate
  modified_base 8: mod_base = OTHER; note = 2'-O-methyluridine-3'-phosphate
  modified_base 9: mod_base = OTHER; note = 2'-deoxy-2'-fluorouridine-3'-phosphate
  modified_base 10: mod_base = OTHER; note = 2'-O-methylcytidine-3'-phosphate
  modified_base 11: mod_base = OTHER; note = 2'-deoxy-2'-fluorouridine-3'-phosphate
  modified_base 12: mod_base = OTHER; note = 2'-O-methyluridine-3'-phosphate
  modified_base 13: mod_base = OTHER; note = 2'-deoxy-2'-fluoroguanosine-3'-phosphate
  modified_base 14: mod_base = OTHER; note = 2'-O-methylcytidine-3'-phosphate
  modified_base 15: mod_base = OTHER; note = 2'-deoxy-2'-fluorouridine-3'-phosphate
  modified_base 16: mod_base = OTHER; note = 2'-O-methylcytidine-3'-phosphate
  modified_base 17: mod_base = OTHER; note = 2'-deoxy-2'-fluorouridine-3'-phosphate
  modified_base 18: mod_base = OTHER; note = 2'-O-methyladenosine-3'-phosphate
  modified_base 19: mod_base = OTHER; note = 2'-deoxy-2'-fluorouridine-3'-phosphate
  modified_base 20: mod_base = OTHER; note = 2'-deoxy-2'-fluoroadenosine-3'-phosphorothioate
  modified_base 21: mod_base = OTHER; note = 2'-deoxy-2'-fluoroadenosine
aacagtgttcttgctctataa

SEQ ID NO: 396 - DNA, 21 bp, synthetic construct
  source 1..21: mol_type = other DNA
  modified_base 1: mod_base = OTHER; note = 2'-O-methyladenosine-3'-phosphate
  modified_base 2: mod_base = OTHER; note = 2'-O-methyladenosine-3'-phosphate
  modified_base 3: mod_base = OTHER; note = 2'-O-methylcytidine-3'-phosphate
  modified_base 4: mod_base = OTHER; note = 2'-O-methyladenosine-3'-phosphate
  modified_base 5: mod_base = OTHER; note = 2'-O-methylguanosine-3'-phosphate
  modified_base 6: mod_base = OTHER; note = 2'-O-methyluridine-3'-phosphate
  modified_base 7: mod_base = OTHER; note = 2'-O-methylguanosine-3'-phosphate
  modified_base 8: mod_base = OTHER; note = 2'-O-methyluridine-3'-phosphate
  modified_base 9: mod_base = OTHER; note = 2'-O-methyluridine-3'-phosphate
  modified_base 10: mod_base = OTHER; note = 2'-O-methylcytidine-3'-phosphate
  modified_base 12: mod_base = OTHER; note = 2'-O-methyluridine-3'-phosphate
  modified_base 14: mod_base = OTHER; note = 2'-O-methylcytidine-3'-phosphate
  modified_base 16: mod_base = OTHER; note = 2'-O-methylcytidine-3'-phosphate
  modified_base 18: mod_base = OTHER; note = 2'-O-methyladenosine-3'-phosphate
  modified_base 20: mod_base = OTHER; note = 2'-O-methyladenosine-3'-phosphorothioate
  modified_base 21: mod_base = OTHER; note = 2'-O-methyladenosine
  misc_feature 1..10: note = RNA
  misc_feature 12: note = RNA
  misc_feature 14: note = RNA
  misc_feature 16: note = RNA
  misc_feature 18: note = RNA
  misc_feature 20..21: note = RNA
  misc_feature 11: note = DNA
  misc_feature 13: note = DNA
  misc_feature 15: note = DNA
  misc_feature 17: note = DNA
  misc_feature 19: note = DNA
aacagtgttcttgctctataa

SEQ ID NO: 397 - RNA, 21 nt, synthetic construct
  source 1..21: mol_type = other RNA
  modified_base 1: mod_base = OTHER; note = 2'-deoxy-2'-fluoroadenosine-3'-phosphate
  modified_base 2: mod_base = OTHER; note = 2'-O-methyladenosine-3'-phosphate
  modified_base 3: mod_base = OTHER; note = 2'-O-methylcytidine-3'-phosphate
  modified_base 4: mod_base = OTHER; note = 2'-O-methyladenosine-3'-phosphate
  modified_base 5: mod_base = OTHER; note = 2'-deoxy-2'-fluoroguanosine-3'-phosphate
  modified_base 6: mod_base = OTHER; note = 2'-O-methyluridine-3'-phosphate
  modified_base 7: mod_base = OTHER; note = 2'-deoxy-2'-fluoroguanosine-3'-phosphate
  modified_base 8: mod_base = OTHER; note = 2'-O-methyluridine-3'-phosphate
  modified_base 9: mod_base = OTHER; note = 2'-deoxy-2'-fluorouridine-3'-phosphate
  modified_base 10: mod_base = OTHER; note = 2'-O-methylcytidine-3'-phosphate
  modified_base 11: mod_base = OTHER; note = 2'-deoxy-2'-fluorouridine-3'-phosphate
  modified_base 12: mod_base = OTHER; note = 2'-O-methyluridine-3'-phosphate
  modified_base 13: mod_base = OTHER; note = 2'-deoxy-2'-fluoroguanosine-3'-phosphate
  modified_base 14: mod_base = OTHER; note = 2'-deoxy-2'-fluorocytidine-3'-phosphate
  modified_base 15: mod_base = OTHER; note = 2'-deoxy-2'-fluorouridine-3'-phosphate
  modified_base 16: mod_base = OTHER; note = 2'-O-methylcytidine-3'-phosphate
  modified_base 17: mod_base = OTHER; note = 2'-deoxy-2'-fluorouridine-3'-phosphate
  modified_base 18: mod_base = OTHER; note = 2'-O-methyladenosine-3'-phosphate
  modified_base 19: mod_base = OTHER; note = 2'-deoxy-2'-fluorouridine-3'-phosphate
  modified_base 20: mod_base = OTHER; note = 2'-O-methyladenosine-3'-phosphorothioate
  modified_base 21: mod_base = OTHER; note = 2'-deoxy-2'-fluoroadenosine
aacagtgttcttgctctataa

SEQ ID NO: 398 - RNA, 21 nt, synthetic construct
  source 1..21: mol_type = other RNA
  modified_base 1: mod_base = OTHER; note = 2'-deoxy-2'-fluoroadenosine-3'-phosphate
  modified_base 2: mod_base = OTHER; note = 2'-O-methyladenosine-3'-phosphate
  modified_base 3: mod_base = OTHER; note = 2'-deoxy-2'-fluorocytidine-3'-phosphate
  modified_base 4: mod_base = OTHER; note = 2'-O-methyladenosine-3'-phosphate
  modified_base 5: mod_base = OTHER; note = 2'-deoxy-2'-fluoroguanosine-3'-phosphate
  modified_base 6: mod_base = OTHER; note = 2'-O-methyluridine-3'-phosphate
  modified_base 7: mod_base = OTHER; note = 2'-O-methylguanosine-3'-phosphate
  modified_base 8: mod_base = OTHER; note = 2'-O-methyluridine-3'-phosphate
  modified_base 9: mod_base = OTHER; note = 2'-deoxy-2'-fluorouridine-3'-phosphate
  modified_base 10: mod_base = OTHER; note = 2'-O-methylcytidine-3'-phosphate
  modified_base 11: mod_base = OTHER; note = 2'-deoxy-2'-fluorouridine-3'-phosphate
  modified_base 12: mod_base = OTHER; note = 2'-O-methyluridine-3'-phosphate
  modified_base 13: mod_base = OTHER; note = 2'-deoxy-2'-fluoroguanosine-3'-phosphate
  modified_base 14: mod_base = OTHER; note = 2'-O-methylcytidine-3'-phosphate
  modified_base 15: mod_base = OTHER; note = 2'-deoxy-2'-fluorouridine-3'-phosphate
  modified_base 16: mod_base = OTHER; note = 2'-deoxy-2'-fluorocytidine-3'-phosphate
  modified_base 17: mod_base = OTHER; note = 2'-deoxy-2'-fluorouridine-3'-phosphate
  modified_base 18: mod_base = OTHER; note = 2'-O-methyladenosine-3'-phosphate
  modified_base 19: mod_base = OTHER; note = 2'-deoxy-2'-fluorouridine-3'-phosphate
  modified_base 20: mod_base = OTHER; note = 2'-O-methyladenosine-3'-phosphorothioate
  modified_base 21: mod_base = OTHER; note = 2'-deoxy-2'-fluoroadenosine
aacagtgttcttgctctataa

SEQ ID NO: 399 - RNA, 21 nt, synthetic construct
  source 1..21: mol_type = other RNA
  modified_base 1: mod_base = OTHER; note = 2'-deoxy-2'-fluoroadenosine-3'-phosphate
  modified_base 2: mod_base = OTHER; note = 2'-O-methyladenosine-3'-phosphate
  modified_base 3: mod_base = OTHER; note = 2'-deoxy-2'-fluorocytidine-3'-phosphate
  modified_base 4: mod_base = OTHER; note = 2'-O-methyladenosine-3'-phosphate
  modified_base 5: mod_base = OTHER; note = 2'-deoxy-2'-fluoroguanosine-3'-phosphate
  modified_base 6: mod_base = OTHER; note = 2'-O-methyluridine-3'-phosphate
  modified_base 7: mod_base = OTHER; note = 2'-deoxy-2'-fluoroguanosine-3'-phosphate
  modified_base 8: mod_base = OTHER; note = 2'-O-methyluridine-3'-phosphate
  modified_base 9: mod_base = OTHER; note = 2'-deoxy-2'-fluorouridine-3'-phosphate
  modified_base 10: mod_base = OTHER; note = 2'-O-methylcytidine-3'-phosphate
  modified_base 11: mod_base = OTHER; note = 2'-O-methyluridine-3'-phosphate
  modified_base 12: mod_base = OTHER; note = 2'-O-methyluridine-3'-phosphate
  modified_base 13: mod_base = OTHER; note = 2'-deoxy-2'-fluoroguanosine-3'-phosphate
  modified_base 14: mod_base = OTHER; note = 2'-O-methylcytidine-3'-phosphate
  modified_base 15: mod_base = OTHER; note = 2'-deoxy-2'-fluorouridine-3'-phosphate
  modified_base 16: mod_base = OTHER; note = 2'-O-methylcytidine-3'-phosphate
  modified_base 17: mod_base = OTHER; note = 2'-deoxy-2'-fluorouridine-3'-phosphate
  modified_base 18: mod_base = OTHER; note = 2'-deoxy-2'-fluoroadenosine-3'-phosphate
  modified_base 19: mod_base = OTHER; note = 2'-deoxy-2'-fluorouridine-3'-phosphate
  modified_base 20: mod_base = OTHER; note = 2'-O-methyladenosine-3'-phosphorothioate
  modified_base 21: mod_base = OTHER; note = 2'-deoxy-2'-fluoroadenosine
aacagtgttcttgctctataa

SEQ ID NO: 400 - RNA, 21 nt, synthetic construct
  source 1..21: mol_type = other RNA
  modified_base 1: mod_base = OTHER; note = 2'-deoxy-2'-fluoroadenosine-3'-phosphate
  modified_base 2: mod_base = OTHER; note = 2'-O-methyladenosine-3'-phosphate
  modified_base 3: mod_base = OTHER; note = 2'-deoxy-2'-fluorocytidine-3'-phosphate
  modified_base 4: mod_base = OTHER; note = 2'-O-methyladenosine-3'-phosphate
  modified_base 5: mod_base = OTHER; note = 2'-deoxy-2'-fluoroguanosine-3'-phosphate
  modified_base 6: mod_base = OTHER; note = 2'-O-methyluridine-3'-phosphate
  modified_base 7: mod_base = OTHER; note = 2'-deoxy-2'-fluoroguanosine-3'-phosphate
  modified_base 8: mod_base = OTHER; note = 2'-O-methyluridine-3'-phosphate
  modified_base 9: mod_base = OTHER; note = 2'-deoxy-2'-fluorouridine-3'-phosphate
  modified_base 10: mod_base = OTHER; note = 2'-O-methylcytidine-3'-phosphate
  modified_base 11: mod_base = OTHER; note = 2'-deoxy-2'-fluorouridine-3'-phosphate
  modified_base 12: mod_base = OTHER; note = 2'-O-methyluridine-3'-phosphate
  modified_base 13: mod_base = OTHER; note = 2'-deoxy-2'-fluoroguanosine-3'-phosphate
  modified_base 14: mod_base = OTHER; note = 2'-O-methylcytidine-3'-phosphate
  modified_base 15: mod_base = OTHER; note = 2'-O-methyluridine-3'-phosphate
  modified_base 16: mod_base = OTHER; note = 2'-O-methylcytidine-3'-phosphate
  modified_base 17: mod_base = OTHER; note = 2'-deoxy-2'-fluorouridine-3'-phosphate
  modified_base 18: mod_base = OTHER; note = 2'-O-methyladenosine-3'-phosphate
  modified_base 19: mod_base = OTHER; note = 2'-deoxy-2'-fluorouridine-3'-phosphate
  modified_base 20: mod_base = OTHER; note = 2'-deoxy-2'-fluoroadenosine-3'-phosphorothioate
  modified_base 21: mod_base = OTHER; note = 2'-deoxy-2'-fluoroadenosine
aacagtgttcttgctctataa

SEQ ID NO: 401 - RNA, 21 nt, synthetic construct
  source 1..21: mol_type = other RNA
  modified_base 1: mod_base = OTHER; note = 2'-deoxy-2'-fluoroadenosine-3'-phosphate
  modified_base 2: mod_base = OTHER; note = 2'-O-methyladenosine-3'-phosphate
  modified_base 3: mod_base = OTHER; note = 2'-deoxy-2'-fluorocytidine-3'-phosphate
  modified_base 4: mod_base = OTHER; note = 2'-O-methyladenosine-3'-phosphate
  modified_base 5: mod_base = OTHER; note = 2'-deoxy-2'-fluoroguanosine-3'-phosphate
  modified_base 6: mod_base = OTHER; note = 2'-O-methyluridine-3'-phosphate
  modified_base 7: mod_base = OTHER; note = 2'-deoxy-2'-fluoroguanosine-3'-phosphate
  modified_base 8: mod_base = OTHER; note = 2'-O-methyluridine-3'-phosphate
  modified_base 9: mod_base = OTHER; note = 2'-deoxy-2'-fluorouridine-3'-phosphate
  modified_base 10: mod_base = OTHER; note = 2'-O-methylcytidine-3'-phosphate
  modified_base 11: mod_base = OTHER; note = 2'-deoxy-2'-fluorouridine-3'-phosphate
  modified_base 12: mod_base = OTHER; note = 2'-O-methyluridine-3'-phosphate
  modified_base 13: mod_base = OTHER; note = 2'-deoxy-2'-fluoroguanosine-3'-phosphate
  modified_base 14: mod_base = OTHER; note = 2'-O-methylcytidine-3'-phosphate
  modified_base 15: mod_base = OTHER; note = 2'-deoxy-2'-fluorouridine-3'-phosphate
  modified_base 16: mod_base = OTHER; note = 2'-O-methylcytidine-3'-phosphate
  modified_base 17: mod_base = OTHER; note = 2'-deoxy-2'-fluorouridine-3'-phosphate
  modified_base 18: mod_base = OTHER; note = 2'-O-methyladenosine-3'-phosphate
  modified_base 19: mod_base = OTHER; note = 2'-deoxy-2'-fluorouridine-3'-phosphate
  modified_base 20: mod_base = OTHER; note = 2'-deoxy-2'-fluoroadenosine-3'-phosphorothioate
  modified_base 21: mod_base = OTHER; note = 2'-deoxy-2'-fluoroadenosine
aacagtgttcttgctctataa

SEQ ID NO: 402 - DNA, 21 bp, synthetic construct
  source 1..21: mol_type = other DNA
  modified_base 1: mod_base = OTHER; note = 2'-deoxy-2'-fluoroadenosine-3'-phosphate
  modified_base 2: mod_base = OTHER; note = 2'-O-methyladenosine-3'-phosphate
  modified_base 3: mod_base = OTHER; note = 2'-deoxy-2'-fluorocytidine-3'-phosphate
  modified_base 4: mod_base = OTHER; note = 2'-O-methyladenosine-3'-phosphate
  modified_base 5: mod_base = OTHER; note = 2'-deoxy-2'-fluoroadenosine-3'-phosphate
  modified_base 6: mod_base = OTHER; note = 2'-O-methyluridine-3'-phosphate
  modified_base 7: mod_base = OTHER; note = 2'-deoxy-2'-fluoroguanosine-3'-phosphate
  modified_base 8: mod_base = OTHER; note = 2'-O-methyluridine-3'-phosphate
  modified_base 9: mod_base = OTHER; note = 2'-deoxy-2'-fluorouridine-3'-phosphate
  modified_base 10: mod_base = OTHER; note = 2'-O-methylcytidine-3'-phosphate
  modified_base 11: mod_base = OTHER; note = 2'-deoxy-2'-fluorouridine-3'-phosphate
  modified_base 12: mod_base = OTHER; note = 2'-O-methyluridine-3'-phosphate
  modified_base 13: mod_base = OTHER; note = 2'-deoxy-2'-fluoroguanosine-3'-phosphate
  modified_base 14: mod_base = OTHER; note = 2'-O-methylcytidine-3'-phosphate
  modified_base 19: mod_base = OTHER; note = 2'-deoxy-2'-fluorouridine-3'-phosphate
  modified_base 20: mod_base = OTHER; note = 2'-O-methyladenosine-3'-phosphorothioate
  modified_base 21: mod_base = OTHER; note = 2'-deoxy-2'-fluoroadenosine
  misc_feature 1..14: note = RNA
  misc_feature 19..21: note = RNA
  misc_feature 15..18: note = DNA
aacaatgttcttgcactataa

SEQ ID NO: 403 - RNA, 21 nt, synthetic construct
  source 1..21: mol_type = other RNA
  modified_base 1: mod_base = OTHER; note = 2'-deoxy-2'-fluoroadenosine-3'-phosphate
  modified_base 2: mod_base = OTHER; note = 2'-O-methyladenosine-3'-phosphate
  modified_base 3: mod_base = OTHER; note = 2'-O-methylcytidine-3'-phosphate
  modified_base 4: mod_base = OTHER; note = 2'-O-methyladenosine-3'-phosphate
  modified_base 5: mod_base = OTHER; note = 2'-deoxy-2'-fluoroguanosine-3'-phosphate
  modified_base 6: mod_base = OTHER; note = 2'-O-methyluridine-3'-phosphate
  modified_base 7: mod_base = OTHER; note = 2'-O-methylguanosine-3'-phosphate
  modified_base 8: mod_base = OTHER; note = 2'-O-methyluridine-3'-phosphate
  modified_base 9: mod_base = OTHER; note = 2'-deoxy-2'-fluorouridine-3'-phosphate
  modified_base 10: mod_base = OTHER; note = 2'-O-methylcytidine-3'-phosphate
  modified_base 11: mod_base = OTHER; note = 2'-O-methyluridine-3'-phosphate
  modified_base 12: mod_base = OTHER; note = 2'-O-methyluridine-3'-phosphate
  modified_base 13: mod_base = OTHER; note = 2'-deoxy-2'-fluoroguanosine-3'-phosphate
  modified_base 14: mod_base = OTHER; note = 2'-O-methylcytidine-3'-phosphate
  modified_base 15: mod_base = OTHER; note = 2'-O-methyluridine-3'-phosphate
  modified_base 16: mod_base = OTHER; note = 2'-O-methylcytidine-3'-phosphate
  modified_base 17: mod_base = OTHER; note = 2'-deoxy-2'-fluorouridine-3'-phosphate
  modified_base 18: mod_base = OTHER; note = 2'-O-methyladenosine-3'-phosphate
  modified_base 19: mod_base = OTHER; note = 2'-O-methyluridine-3'-phosphate
  modified_base 20: mod_base = OTHER; note = 2'-O-methyladenosine-3'-phosphorothioate
  modified_base 21: mod_base = OTHER; note = 2'-deoxy-2'-fluoroadenosine
aacagtgttcttgctctataa

SEQ ID NO: 404 - DNA, 21 bp, synthetic construct
  source 1..21: mol_type = other DNA
  modified_base 2: mod_base = OTHER; note = 2'-O-methyladenosine-3'-phosphate
  modified_base 3: mod_base = OTHER; note = 2'-O-methylcytidine-3'-phosphate
  modified_base 4: mod_base = OTHER; note = 2'-O-methyladenosine-3'-phosphate
  modified_base 6: mod_base = OTHER; note = 2'-O-methyluridine-3'-phosphate
  modified_base 7: mod_base = OTHER; note = 2'-O-methylguanosine-3'-phosphate
  modified_base 8: mod_base = OTHER; note = 2'-O-methyluridine-3'-phosphate
  modified_base 10: mod_base = OTHER; note = 2'-O-methylcytidine-3'-phosphate
  modified_base 11: mod_base = OTHER; note = 2'-O-methyluridine-3'-phosphate
  modified_base 12: mod_base = OTHER; note = 2'-O-methyluridine-3'-phosphate
  modified_base 14: mod_base = OTHER; note = 2'-O-methylcytidine-3'-phosphate
  modified_base 15: mod_base = OTHER; note = 2'-O-methyluridine-3'-phosphate
  modified_base 16: mod_base = OTHER; note = 2'-O-methylcytidine-3'-phosphate
  modified_base 18: mod_base = OTHER; note = 2'-O-methyladenosine-3'-phosphate
  modified_base 19: mod_base = OTHER; note = 2'-O-methyluridine-3'-phosphate
  modified_base 20: mod_base = OTHER; note = 2'-O-methyladenosine-3'-phosphorothioate
  misc_feature 2..4: note = RNA
  misc_feature 6..8: note = RNA
  misc_feature 10..12: note = RNA
  misc_feature 14..16: note = RNA
  misc_feature 18..20: note = RNA
  misc_feature 1: note = DNA
  misc_feature 5: note = DNA
  misc_feature 9: note = DNA
  misc_feature 13: note = DNA
  misc_feature 17: note = DNA
  misc_feature 21: note = DNA
aacagtgttcttgctctataa

SEQ ID NO: 405 - DNA, 21 bp, synthetic construct
  source 1..21: mol_type = other DNA
  modified_base 1: mod_base = OTHER; note = 2'-deoxy-2'-fluoroadenosine-3'-phosphate
  modified_base 2: mod_base = OTHER; note = 2'-O-methyladenosine-3'-phosphate
  modified_base 3: mod_base = OTHER; note = 2'-deoxy-2'-fluorocytidine-3'-phosphate
  modified_base 4: mod_base = OTHER; note = 2'-O-methyladenosine-3'-phosphate
  modified_base 5: mod_base = OTHER; note = 2'-deoxy-2'-fluoroadenosine-3'-phosphate
  modified_base 6: mod_base = OTHER; note = 2'-O-methyluridine-3'-phosphate
  modified_base 7: mod_base = OTHER; note = 2'-deoxy-2'-fluoroguanosine-3'-phosphate
  modified_base 8: mod_base = OTHER; note = 2'-O-methyluridine-3'-phosphate
  modified_base 9: mod_base = OTHER; note = 2'-deoxy-2'-fluorouridine-3'-phosphate
  modified_base 10: mod_base = OTHER; note = 2'-O-methylcytidine-3'-phosphate
  modified_base 11: mod_base = OTHER; note = 2'-deoxy-2'-fluorouridine-3'-phosphate
  modified_base 12: mod_base = OTHER; note = 2'-O-methyluridine-3'-phosphate
  modified_base 13: mod_base = OTHER; note = 2'-deoxy-2'-fluoroguanosine-3'-phosphate
  modified_base 18: mod_base = OTHER; note = 2'-O-methyladenosine-3'-phosphate
  modified_base 19: mod_base = OTHER; note = 2'-deoxy-2'-fluorouridine-3'-phosphate
  modified_base 20: mod_base = OTHER; note = 2'-O-methyladenosine-3'-phosphorothioate
  modified_base 21: mod_base = OTHER; note = 2'-deoxy-2'-fluoroadenosine
  misc_feature 1..13: note = RNA
  misc_feature 18..21: note = RNA
  misc_feature 14..17: note = DNA
aacaatgttcttgcactataa

SEQ ID NO: 406 - DNA, 21 bp, synthetic construct
  source 1..21: mol_type = other DNA
  modified_base 1: mod_base = OTHER; note = 2'-deoxy-2'-fluoroadenosine-3'-phosphate
  modified_base 2: mod_base = OTHER; note = 2'-O-methyladenosine-3'-phosphate
  modified_base 3: mod_base = OTHER; note = 2'-deoxy-2'-fluorocytidine-3'-phosphate
  modified_base 4: mod_base = OTHER; note = 2'-O-methyladenosine-3'-phosphate
  modified_base 5: mod_base = OTHER; note = 2'-deoxy-2'-fluoroadenosine-3'-phosphate
  modified_base 6: mod_base = OTHER; note = 2'-O-methyluridine-3'-phosphate
  modified_base 7: mod_base = OTHER; note = 2'-deoxy-2'-fluoroguanosine-3'-phosphate
  modified_base 8: mod_base = OTHER; note = 2'-O-methyluridine-3'-phosphate
  modified_base 9: mod_base = OTHER; note = 2'-deoxy-2'-fluorouridine-3'-phosphate
  modified_base 10: mod_base = OTHER; note = 2'-O-methylcytidine-3'-phosphate
  modified_base 11: mod_base = OTHER; note = 2'-deoxy-2'-fluorouridine-3'-phosphate
  modified_base 12: mod_base = OTHER; note = 2'-O-methyluridine-3'-phosphate
  modified_base 17: mod_base = OTHER; note = 2'-deoxy-2'-fluorouridine-3'-phosphate
  modified_base 18: mod_base = OTHER; note = 2'-O-methyladenosine-3'-phosphate
  modified_base 19: mod_base = OTHER; note = 2'-deoxy-2'-fluorouridine-3'-phosphate
  modified_base 20: mod_base = OTHER; note = 2'-O-methyladenosine-3'-phosphorothioate
  modified_base 21: mod_base = OTHER; note = 2'-deoxy-2'-fluoroadenosine
  misc_feature 1..12: note = RNA
  misc_feature 17..21: note = RNA
  misc_feature 13..16: note = DNA
aacaatgttcttgcactataa

SEQ ID NO: 407 - RNA, 21 nt, synthetic construct
  source 1..21: mol_type = other RNA
  modified_base 1: mod_base = OTHER; note = 2'-O-methyladenosine-3'-phosphate
  modified_base 2: mod_base = OTHER; note = 2'-O-methyladenosine-3'-phosphate
  modified_base 3: mod_base = OTHER; note = 2'-deoxy-2'-fluorocytidine-3'-phosphate
  modified_base 4: mod_base = OTHER; note = 2'-deoxy-2'-fluoroadenosine-3'-phosphate
  modified_base 5: mod_base = OTHER; note = 2'-O-methylguanosine-3'-phosphate
  modified_base 6: mod_base = OTHER; note = 2'-O-methyluridine-3'-phosphate
  modified_base 7: mod_base = OTHER; note = 2'-deoxy-2'-fluoroguanosine-3'-phosphate
  modified_base 8: mod_base = OTHER; note = 2'-deoxy-2'-fluorouridine-3'-phosphate
  modified_base 9: mod_base = OTHER; note = 2'-O-methyluridine-3'-phosphate
  modified_base 10: mod_base = OTHER; note = 2'-O-methylcytidine-3'-phosphate
  modified_base 11: mod_base = OTHER; note = 2'-deoxy-2'-fluorouridine-3'-phosphate
  modified_base 12: mod_base = OTHER; note = 2'-deoxy-2'-fluorouridine-3'-phosphate
  modified_base 13: mod_base = OTHER; note = 2'-O-methylguanosine-3'-phosphate
  modified_base 14: mod_base = OTHER; note = 2'-O-methylcytidine-3'-phosphate
  modified_base 15: mod_base = OTHER; note = 2'-deoxy-2'-fluorouridine-3'-phosphate
  modified_base 16: mod_base = OTHER; note = 2'-deoxy-2'-fluorocytidine-3'-phosphate
  modified_base 17: mod_base = OTHER; note = 2'-O-methyluridine-3'-phosphate
  modified_base 18: mod_base = OTHER; note = 2'-O-methyladenosine-3'-phosphate
  modified_base 19: mod_base = OTHER; note = 2'-deoxy-2'-fluorouridine-3'-phosphate
  modified_base 20: mod_base = OTHER; note = 2'-deoxy-2'-fluoroadenosine-3'-phosphorothioate
  modified_base 21: mod_base = OTHER; note = 2'-O-methyladenosine
aacagtgttcttgctctataa

SEQ ID NO: 408 - DNA, 21 bp, synthetic construct
  source 1..21: mol_type = other DNA
  modified_base 1: mod_base = OTHER; note = 2'-deoxy-2'-fluoroadenosine-3'-phosphate
  modified_base 2: mod_base = OTHER; note = 2'-O-methyladenosine-3'-phosphate
  modified_base 3: mod_base = OTHER; note = 2'-deoxy-2'-fluorocytidine-3'-phosphate
  modified_base 4: mod_base = OTHER; note = 2'-O-methyladenosine-3'-phosphate
  modified_base 5: mod_base = OTHER; note = 2'-deoxy-2'-fluoroadenosine-3'-phosphate
  modified_base 6: mod_base = OTHER; note = 2'-O-methyluridine-3'-phosphate
  modified_base 7: mod_base = OTHER; note = 2'-deoxy-2'-fluoroguanosine-3'-phosphate
  modified_base 8: mod_base = OTHER; note = 2'-O-methyluridine-3'-phosphate
  modified_base 9: mod_base = OTHER; note = 2'-deoxy-2'-fluorouridine-3'-phosphate
  modified_base 10: mod_base = OTHER; note = 2'-O-methylcytidine-3'-phosphate
  modified_base 11: mod_base = OTHER; note = 2'-deoxy-2'-fluorouridine-3'-phosphate
  modified_base 12: mod_base = OTHER; note = 2'-O-methyluridine-3'-phosphate
  modified_base 13: mod_base = OTHER; note = 2'-deoxy-2'-fluoroguanosine-3'-phosphate
  modified_base 14: mod_base = OTHER; note = 2'-O-methylcytidine-3'-phosphate
  modified_base 17: mod_base = OTHER; note = 2'-deoxy-2'-fluorouridine-3'-phosphate
  modified_base 18: mod_base = OTHER; note = 2'-O-methyladenosine-3'-phosphate
  modified_base 20: mod_base = OTHER; note = 2'-deoxyadenosine-3'-phosphorothioate
  modified_base 21: mod_base = OTHER; note = 2'-deoxy-2'-fluoroadenosine
  misc_feature 1..14: note = RNA
  misc_feature 17..18: note = RNA
  misc_feature 21: note = RNA
  misc_feature 15..16: note = DNA
  misc_feature 19..20: note = DNA
aacaatgttcttgcactataa

SEQ ID NO: 409 - RNA, 21 nt, synthetic construct
  source 1..21: mol_type = other RNA
  modified_base 1: mod_base = OTHER; note = 2'-O-methyladenosine-3'-phosphate
  modified_base 2: mod_base = OTHER; note = 2'-O-methyladenosine-3'-phosphate
  modified_base 3: mod_base = OTHER; note = 2'-O-methylcytidine-3'-phosphate
  modified_base 5: mod_base = OTHER; note = 2'-O-methylguanosine-3'-phosphate
  modified_base 6: mod_base = OTHER; note = 2'-O-methyluridine-3'-phosphate
  modified_base 7: mod_base = OTHER; note = 2'-O-methylguanosine-3'-phosphate
  modified_base 9: mod_base = OTHER; note = 2'-O-methyluridine-3'-phosphate
  modified_base 10: mod_base = OTHER; note = 2'-O-methylcytidine-3'-phosphate
  modified_base 11: mod_base = OTHER; note = 2'-O-methyluridine-3'-phosphate
  modified_base 13: mod_base = OTHER; note = 2'-O-methylguanosine-3'-phosphate
  modified_base 14: mod_base = OTHER; note = 2'-O-methylcytidine-3'-phosphate
  modified_base 15: mod_base = OTHER; note = 2'-O-methyluridine-3'-phosphate
  modified_base 17: mod_base = OTHER; note = 2'-O-methyluridine-3'-phosphate
  modified_base 18: mod_base = OTHER; note = 2'-O-methyladenosine-3'-phosphate
  modified_base 19: mod_base = OTHER; note = 2'-O-methyluridine-3'-phosphate
  modified_base 20: mod_base = OTHER; note = adenosine-3'-phosphorothioate
  modified_base 21: mod_base = OTHER; note = 2'-O-methyladenosine
aacagtgttcttgctctataa

SEQ ID NO: 410 - RNA, 21 nt, synthetic construct
  source 1..21: mol_type = other RNA
  modified_base 2: mod_base = OTHER; note = 2'-O-methyladenosine-3'-phosphate
  modified_base 3: mod_base = OTHER; note = 2'-O-methylcytidine-3'-phosphate
  modified_base 4: mod_base = OTHER; note = 2'-O-methyladenosine-3'-phosphate
  modified_base 6: mod_base = OTHER; note = 2'-O-methyluridine-3'-phosphate
  modified_base 7: mod_base = OTHER; note = 2'-O-methylguanosine-3'-phosphate
  modified_base 8: mod_base = OTHER; note = 2'-O-methyluridine-3'-phosphate
  modified_base 10: mod_base = OTHER; note = 2'-O-methylcytidine-3'-phosphate
  modified_base 11: mod_base = OTHER; note = 2'-O-methyluridine-3'-phosphate
  modified_base 12: mod_base = OTHER; note = 2'-O-methyluridine-3'-phosphate
  modified_base 14: mod_base = OTHER; note = 2'-O-methylcytidine-3'-phosphate
  modified_base 15: mod_base = OTHER; note = 2'-O-methyluridine-3'-phosphate
  modified_base 16: mod_base = OTHER; note = 2'-O-methylcytidine-3'-phosphate
  modified_base 18: mod_base = OTHER; note = 2'-O-methyladenosine-3'-phosphate
  modified_base 19: mod_base = OTHER; note = 2'-O-methyluridine-3'-phosphate
  modified_base 20: mod_base = OTHER; note = 2'-O-methyladenosine-3'-phosphorothioate
aacagtgttcttgctctataa

SEQ ID NO: 411 - DNA, 21 bp, synthetic construct
  source 1..21: mol_type = other DNA
  modified_base 1: mod_base = OTHER; note = 2'-deoxy-2'-fluoroadenosine-3'-phosphate
  modified_base 2: mod_base = OTHER; note = 2'-O-methyladenosine-3'-phosphate
  modified_base 3: mod_base = OTHER; note = 2'-deoxy-2'-fluorocytidine-3'-phosphate
  modified_base 4: mod_base = OTHER; note = 2'-O-methyladenosine-3'-phosphate
  modified_base 5: mod_base = OTHER; note = 2'-deoxy-2'-fluoroadenosine-3'-phosphate
  modified_base 6: mod_base = OTHER; note = 2'-O-methyluridine-3'-phosphate
  modified_base 7: mod_base = OTHER; note = 2'-deoxy-2'-fluoroguanosine-3'-phosphate
  modified_base 8: mod_base = OTHER; note = 2'-O-methyluridine-3'-phosphate
  modified_base 9: mod_base = OTHER; note = 2'-deoxy-2'-fluorouridine-3'-phosphate
  modified_base 10: mod_base = OTHER; note = 2'-O-methylcytidine-3'-phosphate
  modified_base 11: mod_base = OTHER; note = 2'-deoxy-2'-fluorouridine-3'-phosphate
  modified_base 12: mod_base = OTHER; note = 2'-O-methyluridine-3'-phosphate
  modified_base 15: mod_base = OTHER; note = 2'-deoxy-2'-fluoroadenosine-3'-phosphate
  modified_base 16: mod_base = OTHER; note = 2'-O-methylcytidine-3'-phosphate
  modified_base 17: mod_base = OTHER; note = 2'-deoxy-2'-fluorouridine-3'-phosphate
  modified_base 18: mod_base = OTHER; note = 2'-O-methyladenosine-3'-phosphate
  modified_base 20: mod_base = OTHER; note = 2'-deoxyadenosine-3'-phosphorothioate
  modified_base 21: mod_base = OTHER; note = 2'-deoxy-2'-fluoroadenosine
  misc_feature 1..12: note = RNA
  misc_feature 15..18: note = RNA
  misc_feature 21: note = RNA
  misc_feature 13..14: note = DNA
  misc_feature 19..20: note = DNA
aacaatgttcttgcactataa

SEQ ID NO: 412 - RNA, 21 nt, synthetic construct
  source 1..21: mol_type = other RNA
  modified_base 1: mod_base = OTHER; note = 2'-O-methyladenosine-3'-phosphate
  modified_base 4: mod_base = OTHER; note = 2'-O-methyladenosine-3'-phosphate
  modified_base 5: mod_base = OTHER; note = 2'-O-methylguanosine-3'-phosphate
  modified_base 8: mod_base = OTHER; note = 2'-O-methyluridine-3'-phosphate
  modified_base 9: mod_base = OTHER; note = 2'-O-methyluridine-3'-phosphate
  modified_base 12: mod_base = OTHER; note = 2'-O-methyluridine-3'-phosphate
  modified_base 13: mod_base = OTHER; note = 2'-O-methylguanosine-3'-phosphate
  modified_base 16: mod_base = OTHER; note = 2'-O-methylcytidine-3'-phosphate
  modified_base 17: mod_base = OTHER; note = 2'-O-methyluridine-3'-phosphate
  modified_base 20: mod_base = OTHER; note = 2'-O-methyladenosine-3'-phosphorothioate
  modified_base 21: mod_base = OTHER; note = 2'-O-methyladenosine
aacagtgttcttgctctataa

SEQ ID NO: 413 - DNA, 21 bp, synthetic construct
  source 1..21: mol_type = other DNA
  modified_base 1: mod_base = OTHER; note = 2'-deoxy-2'-fluoroadenosine-3'-phosphate
  modified_base 2: mod_base = OTHER; note = 2'-O-methyladenosine-3'-phosphate
  modified_base 3: mod_base = OTHER; note = 2'-deoxy-2'-fluorocytidine-3'-phosphate
  modified_base 4: mod_base = OTHER; note = 2'-O-methyladenosine-3'-phosphate
  modified_base 5: mod_base = OTHER; note = 2'-deoxy-2'-fluoroadenosine-3'-phosphate
  modified_base 6: mod_base = OTHER; note = 2'-O-methyluridine-3'-phosphate
  modified_base 7: mod_base = OTHER; note = 2'-deoxy-2'-fluoroguanosine-3'-phosphate
  modified_base 8: mod_base = OTHER; note = 2'-O-methyluridine-3'-phosphate
  modified_base 9: mod_base = OTHER; note = 2'-deoxy-2'-fluorouridine-3'-phosphate
  modified_base 10: mod_base = OTHER; note = 2'-O-methylcytidine-3'-phosphate
  modified_base 11: mod_base = OTHER; note = 2'-deoxy-2'-fluorouridine-3'-phosphate
  modified_base 12: mod_base = OTHER; note = 2'-O-methyluridine-3'-phosphate
  modified_base 13: mod_base = OTHER; note = 2'-deoxy-2'-fluoroguanosine-3'-phosphate
  modified_base 14: mod_base = OTHER; note = 2'-O-methylcytidine-3'-phosphate
  modified_base 15: mod_base = OTHER; note = 2'-deoxy-2'-fluoroadenosine-3'-phosphate
  modified_base 16: mod_base = OTHER; note = 2'-O-methylcytidine-3'-phosphate
  modified_base 20: mod_base = OTHER; note = 2'-deoxyadenosine-3'-phosphorothioate
  modified_base 21: mod_base = OTHER; note = 2'-deoxy-2'-fluoroadenosine
  misc_feature 1..16: note = RNA
  misc_feature 21: note = RNA
  misc_feature 17..20: note = DNA
aacaatgttcttgcactataa

SEQ ID NO: 414 - RNA, 21 nt, synthetic construct
  source 1..21: mol_type = other RNA
  modified_base 1: mod_base = OTHER; note = 2'-O-methyladenosine-3'-phosphate
  modified_base 2: mod_base = OTHER; note = 2'-O-methyladenosine-3'-phosphate
  modified_base 5: mod_base = OTHER; note = 2'-O-methylguanosine-3'-phosphate
  modified_base 6: mod_base = OTHER; note = 2'-O-methyluridine-3'-phosphate
  modified_base 9: mod_base = OTHER; note = 2'-O-methyluridine-3'-phosphate
  modified_base 10: mod_base = OTHER; note = 2'-O-methylcytidine-3'-phosphate
  modified_base 13: mod_base = OTHER; note = 2'-O-methylguanosine-3'-phosphate
  modified_base 14: mod_base = OTHER; note = 2'-O-methylcytidine-3'-phosphate
  modified_base 17: mod_base = OTHER; note = 2'-O-methyluridine-3'-phosphate
  modified_base 18: mod_base = OTHER; note = 2'-O-methyladenosine-3'-phosphate
  modified_base 20: mod_base = OTHER; note = adenosine-3'-phosphorothioate
  modified_base 21: mod_base = OTHER; note = 2'-O-methyladenosine
aacagtgttcttgctctataa

SEQ ID NO: 415 - DNA, 21 bp, synthetic construct
  source 1..21: mol_type = other DNA
  modified_base 1: mod_base = OTHER; note = 2'-deoxy-2'-fluoroadenosine-3'-phosphate
  modified_base 2: mod_base = OTHER; note = 2'-O-methyladenosine-3'-phosphate
  modified_base 3: mod_base = OTHER; note = 2'-deoxy-2'-fluorocytidine-3'-phosphate
  modified_base 4: mod_base = OTHER; note = 2'-O-methyladenosine-3'-phosphate
  modified_base 5: mod_base = OTHER; note = 2'-deoxy-2'-fluoroadenosine-3'-phosphate
  modified_base 6: mod_base = OTHER; note = 2'-O-methyluridine-3'-phosphate
  modified_base 7: mod_base = OTHER; note = 2'-deoxy-2'-fluoroguanosine-3'-phosphate
  modified_base 8: mod_base = OTHER; note = 2'-O-methyluridine-3'-phosphate
  modified_base 9: mod_base = OTHER; note = 2'-deoxy-2'-fluorouridine-3'-phosphate
  modified_base 10: mod_base = OTHER; note = 2'-O-methylcytidine-3'-phosphate
  modified_base 11: mod_base = OTHER; note = 2'-deoxy-2'-fluorouridine-3'-phosphate
  modified_base 12: mod_base = OTHER; note = 2'-O-methyluridine-3'-phosphate
  modified_base 13: mod_base = OTHER; note = 2'-deoxy-2'-fluoroguanosine-3'-phosphate
  modified_base 14: mod_base = OTHER; note = 2'-O-methylcytidine-3'-phosphate
  modified_base 15: mod_base = OTHER; note = 2'-deoxy-2'-fluoroadenosine-3'-phosphate
  modified_base 20: mod_base = OTHER; note = 2'-deoxyadenosine-3'-phosphorothioate
  modified_base 21: mod_base = OTHER; note = 2'-deoxy-2'-fluoroadenosine
  misc_feature 1..15: note = RNA
  misc_feature 21: note = RNA
  misc_feature 16..20: note = DNA
aacaatgttcttgcactataa

SEQ ID NO: 416 - RNA, 21 nt, synthetic construct
  source 1..21: mol_type = other RNA
  modified_base 1: mod_base = OTHER; note = 2'-O-methyladenosine-3'-phosphate
  modified_base 2: mod_base = OTHER; note = 2'-O-methyladenosine-3'-phosphate
  modified_base 3: mod_base = OTHER; note = 2'-O-methylcytidine-3'-phosphate
  modified_base 4: mod_base = OTHER; note = 2'-deoxy-2'-fluoroadenosine-3'-phosphate
  modified_base 5: mod_base = OTHER; note = 2'-O-methylguanosine-3'-phosphate
  modified_base 6: mod_base = OTHER; note = 2'-O-methyluridine-3'-phosphate
  modified_base 7: mod_base = OTHER; note = 2'-O-methylguanosine-3'-phosphate
  modified_base 8: mod_base = OTHER; note = 2'-deoxy-2'-fluorouridine-3'-phosphate
  modified_base 9: mod_base = OTHER; note = 2'-O-methyluridine-3'-phosphate
  modified_base 10: mod_base = OTHER; note = 2'-O-methylcytidine-3'-phosphate
  modified_base 11: mod_base = OTHER; note = 2'-O-methyluridine-3'-phosphate
  modified_base 12: mod_base = OTHER; note = 2'-deoxy-2'-fluorouridine-3'-phosphate
  modified_base 13: mod_base = OTHER; note = 2'-O-methylguanosine-3'-phosphate
  modified_base 14: mod_base = OTHER; note = 2'-O-methylcytidine-3'-phosphate
  modified_base 15: mod_base = OTHER; note = 2'-O-methyluridine-3'-phosphate
  modified_base 16: mod_base = OTHER; note = 2'-deoxy-2'-fluorocytidine-3'-phosphate
  modified_base 17: mod_base = OTHER; note = 2'-O-methyluridine-3'-phosphate
  modified_base 18: mod_base = OTHER; note = 2'-O-methyladenosine-3'-phosphate
  modified_base 19: mod_base = OTHER; note = 2'-O-methyluridine-3'-phosphate
  modified_base 20: mod_base = OTHER; note = 2'-deoxy-2'-fluoroadenosine-3'-phosphorothioate
  modified_base 21: mod_base = OTHER; note = 2'-O-methyladenosine
aacagtgttcttgctctataa

SEQ ID NO: 417 - DNA, 21 bp, synthetic construct
  source 1..21: mol_type = other DNA
  modified_base 1: mod_base = OTHER; note = 2'-O-methyladenosine-3'-phosphate
  modified_base 2: mod_base = OTHER; note = 2'-O-methyladenosine-3'-phosphate
  modified_base 3: mod_base = OTHER; note = 2'-O-methylcytidine-3'-phosphate
  modified_base 5: mod_base = OTHER; note = 2'-O-methylguanosine-3'-phosphate
  modified_base 6: mod_base = OTHER; note = 2'-O-methyluridine-3'-phosphate
  modified_base 7: mod_base = OTHER; note = 2'-O-methylguanosine-3'-phosphate
  modified_base 9: mod_base = OTHER; note = 2'-O-methyluridine-3'-phosphate
  modified_base 10: mod_base = OTHER; note = 2'-O-methylcytidine-3'-phosphate
  modified_base 11: mod_base = OTHER; note = 2'-O-methyluridine-3'-phosphate
  modified_base 13: mod_base = OTHER; note = 2'-O-methylguanosine-3'-phosphate
  modified_base 14: mod_base = OTHER; note = 2'-O-methylcytidine-3'-phosphate
  modified_base 15: mod_base = OTHER; note = 2'-O-methyluridine-3'-phosphate
  modified_base 17: mod_base = OTHER; note = 2'-O-methyluridine-3'-phosphate
  modified_base 18: mod_base = OTHER; note = 2'-O-methyladenosine-3'-phosphate
  modified_base 19: mod_base = OTHER; note = 2'-O-methyluridine-3'-phosphate
  modified_base 20: mod_base = OTHER; note = 2'-deoxyadenosine-3'-phosphorothioate
  modified_base 21: mod_base = OTHER; note = 2'-O-methyladenosine
  misc_feature 1..3: note = RNA
  misc_feature 5..7: note = RNA
  misc_feature 9..11: note = RNA
  misc_feature 13..15: note = RNA
  misc_feature 17..19: note = RNA
  misc_feature 21: note = RNA
  misc_feature 4: note = DNA
  misc_feature 8: note = DNA
  misc_feature 12: note = DNA
  misc_feature 16: note = DNA
  misc_feature 20: note = DNA
aacagtgttcttgctctataa

SEQ ID NO: 418 - RNA, 21 nt, synthetic construct
  source 1..21: mol_type = other RNA
  modified_base 1: mod_base = OTHER; note = 2'-deoxy-2'-fluoroadenosine-3'-phosphate
  modified_base 2: mod_base = OTHER; note = 2'-O-methyladenosine-3'-phosphate
  modified_base 3: mod_base = OTHER; note = 2'-deoxy-2'-fluorocytidine-3'-phosphate
  modified_base 4: mod_base = OTHER; note = 2'-O-methyladenosine-3'-phosphate
  modified_base 5: mod_base = OTHER; note = 2'-deoxy-2'-fluoroguanosine-3'-phosphate
  modified_base 6: mod_base = OTHER; note = 2'-O-methyluridine-3'-phosphate
  modified_base 7: mod_base = OTHER; note = 2'-deoxy-2'-fluoroguanosine-3'-phosphate
  modified_base 8: mod_base = OTHER; note = 2'-O-methyluridine-3'-phosphate
  modified_base 9: mod_base = OTHER; note = 2'-deoxy-2'-fluorouridine-3'-phosphate
  modified_base 10: mod_base = OTHER; note = 2'-O-methylcytidine-3'-phosphate
  modified_base 11: mod_base = OTHER; note = 2'-deoxy-2'-fluorouridine-3'-phosphate
  modified_base 12: mod_base = OTHER; note = 2'-O-methyluridine-3'-phosphate
  modified_base 13: mod_base = OTHER; note = 2'-deoxy-2'-fluoroguanosine-3'-phosphate
  modified_base 14: mod_base = OTHER; note = 2'-O-methylcytidine-3'-phosphate
  modified_base 15: mod_base = OTHER; note = 2'-deoxy-2'-fluorouridine-3'-phosphate
  modified_base 16: mod_base = OTHER; note = 2'-O-methylcytidine-3'-phosphate
  modified_base 17: mod_base = OTHER; note = 2'-deoxy-2'-fluorouridine-3'-phosphate
  modified_base 18: mod_base = OTHER; note = 2'-O-methyladenosine-3'-phosphate
  modified_base 19: mod_base = OTHER; note = 2'-deoxy-2'-fluorouridine-3'-phosphate
  modified_base 20: mod_base = OTHER; note = 2'-O-methyladenosine-3'-phosphorothioate
  modified_base 21: mod_base = OTHER; note = 2'-O-methyladenosine
aacagtgttcttgctctataa

SEQ ID NO: 419 - RNA, 21 nt, synthetic construct
  source 1..21: mol_type = other RNA
  modified_base 1: mod_base = OTHER; note = 2'-deoxy-2'-fluoroadenosine-3'-phosphate
  modified_base 2: mod_base = OTHER; note = 2'-O-methyladenosine-3'-phosphate
  modified_base 3: mod_base = OTHER; note = 2'-deoxy-2'-fluorocytidine-3'-phosphate
  modified_base 4: mod_base = OTHER; note = 2'-O-methyladenosine-3'-phosphate
  modified_base 5: mod_base = OTHER; note = 2'-deoxy-2'-fluoroguanosine-3'-phosphate
  modified_base 6: mod_base = OTHER; note = 2'-O-methyluridine-3'-phosphate
  modified_base 7: mod_base = OTHER; note = 2'-deoxy-2'-fluoroguanosine-3'-phosphate
  modified_base 8: mod_base = OTHER; note = 2'-deoxy-2'-fluorouridine-3'-phosphate
  modified_base 9: mod_base = OTHER; note = 2'-deoxy-2'-fluorouridine-3'-phosphate
  modified_base 10: mod_base = OTHER; note = 2'-O-methylcytidine-3'-phosphate
  modified_base 11: mod_base = OTHER; note = 2'-deoxy-2'-fluorouridine-3'-phosphate
  modified_base 12: mod_base = OTHER; note = 2'-O-methyluridine-3'-phosphate
  modified_base 13: mod_base = OTHER; note = 2'-deoxy-2'-fluoroguanosine-3'-phosphate
  modified_base 14: mod_base = OTHER; note = 2'-O-methylcytidine-3'-phosphate
  modified_base 15: mod_base = OTHER; note = 2'-deoxy-2'-fluorouridine-3'-phosphate
  modified_base 16: mod_base = OTHER; note = 2'-O-methylcytidine-3'-phosphate
  modified_base 17: mod_base = OTHER; note = 2'-deoxy-2'-fluorouridine-3'-phosphate
  modified_base 18: mod_base = OTHER; note = 2'-O-methyladenosine-3'-phosphate
  modified_base 19: mod_base = OTHER; note = 2'-deoxy-2'-fluorouridine-3'-phosphate
  modified_base 20: mod_base = OTHER; note = 2'-O-methyladenosine-3'-phosphorothioate
  modified_base 21: mod_base = OTHER; note = 2'-O-methyladenosine
aacagtgttcttgctctataa

SEQ ID NO: 420 - RNA, 21 nt, synthetic construct
  source 1..21: mol_type = other RNA
  modified_base 1: mod_base = OTHER; note = 2'-deoxy-2'-fluoroadenosine-3'-phosphate
  modified_base 2: mod_base = OTHER; note = 2'-O-methyladenosine-3'-phosphate
  modified_base 3: mod_base = OTHER; note = 2'-deoxy-2'-fluorocytidine-3'-phosphate
  modified_base 4: mod_base = OTHER; note = 2'-O-methyladenosine-3'-phosphate
  modified_base 5: mod_base = OTHER; note = 2'-deoxy-2'-fluoroguanosine-3'-phosphate
  modified_base 6: mod_base = OTHER; note = 2'-O-methyluridine-3'-phosphate
  modified_base 7: mod_base = OTHER; note = 2'-deoxy-2'-fluoroguanosine-3'-phosphate
  modified_base 8: mod_base = OTHER; note = 2'-O-methyluridine-3'-phosphate
  modified_base 9: mod_base = OTHER; note = 2'-deoxy-2'-fluorouridine-3'-phosphate
  modified_base 10: mod_base = OTHER; note = 2'-O-methylcytidine-3'-phosphate
  modified_base 11: mod_base = OTHER; note = 2'-deoxy-2'-fluorouridine-3'-phosphate
  modified_base 12: mod_base = OTHER; note = 2'-O-methyluridine-3'-phosphate
  modified_base 13: mod_base = OTHER; note = 2'-deoxy-2'-fluoroguanosine-3'-phosphate
  modified_base 14: mod_base = OTHER; note = 2'-deoxy-2'-fluorocytidine-3'-phosphate
  modified_base 15: mod_base = OTHER; note = 2'-deoxy-2'-fluorouridine-3'-phosphate
  modified_base 16: mod_base = OTHER; note = 2'-O-methylcytidine-3'-phosphate
  modified_base 17: mod_base = OTHER; note = 2'-deoxy-2'-fluorouridine-3'-phosphate
  modified_base 18: mod_base = OTHER; note = 2'-O-methyladenosine-3'-phosphate
  modified_base 19: mod_base = OTHER; note = 2'-deoxy-2'-fluorouridine-3'-phosphate
  modified_base 20: mod_base = OTHER; note = 2'-O-methyladenosine-3'-phosphorothioate
  modified_base 21: mod_base = OTHER; note = 2'-O-methyladenosine
aacagtgttcttgctctataa

SEQ ID NO: 421 - RNA, 21 nt, synthetic construct
  source 1..21: mol_type = other RNA
  modified_base 1: mod_base = OTHER; note = 2'-O-methyladenosine-3'-phosphate
  modified_base 2: mod_base = OTHER; note = 2'-O-methyladenosine-3'-phosphate
  modified_base 3: mod_base = OTHER; note = 2'-O-methylcytidine-3'-phosphate
  modified_base 4: mod_base = OTHER; note = 2'-O-methyladenosine-3'-phosphate
  modified_base 5: mod_base = OTHER; note = 2'-O-methylguanosine-3'-phosphate
  modified_base 6: mod_base = OTHER; note = 2'-O-methyluridine-3'-phosphate
  modified_base 7: mod_base = OTHER; note = 2'-O-methylguanosine-3'-phosphate
  modified_base 8: mod_base = OTHER; note = 2'-O-methyluridine-3'-phosphate
  modified_base 9: mod_base = OTHER; note = 2'-O-methyluridine-3'-phosphate
  modified_base 10: mod_base = OTHER; note = 2'-O-methylcytidine-3'-phosphate
  modified_base 11: mod_base = OTHER; note = 2'-O-methyluridine-3'-phosphate
  modified_base 12: mod_base = OTHER; note = 2'-O-methyluridine-3'-phosphate
  modified_base 13: mod_base = OTHER; note = 2'-O-methylguanosine-3'-phosphate
  modified_base 14: mod_base = OTHER; note = 2'-O-methylcytidine-3'-phosphate
  modified_base 15: mod_base = OTHER; note = 2'-O-methyluridine-3'-phosphate
  modified_base 16: mod_base = OTHER; note = 2'-O-methylcytidine-3'-phosphate
  modified_base 17: mod_base = OTHER; note = 2'-O-methyluridine-3'-phosphate
  modified_base 18: mod_base = OTHER; note = 2'-O-methyladenosine-3'-phosphate
  modified_base 19: mod_base = OTHER; note = 2'-O-methyluridine-3'-phosphate
  modified_base 20: mod_base = OTHER; note = 2'-O-methyladenosine-3'-phosphorothioate
  modified_base 21: mod_base = OTHER; note = 2'-O-methyladenosine
aacagtgttcttgctctataa

SEQ ID NO: 422 - RNA, 21 nt, synthetic construct
  source 1..21: mol_type = other RNA
  modified_base 1: mod_base = OTHER; note = 2'-deoxy-2'-fluoroadenosine-3'-phosphate
  modified_base 2: mod_base = OTHER; note = 2'-O-methyladenosine-3'-phosphate
  modified_base 3: mod_base = OTHER; note = 2'-deoxy-2'-fluorocytidine-3'-phosphate
  modified_base 4: mod_base = OTHER; note = 2'-O-methyladenosine-3'-phosphate
  modified_base 5: mod_base = OTHER; note = 2'-deoxy-2'-fluoroguanosine-3'-phosphate
  modified_base 6: mod_base = OTHER; note = 2'-O-methyluridine-3'-phosphate
  modified_base 7: mod_base = OTHER; note = 2'-deoxy-2'-fluoroguanosine-3'-phosphate
  modified_base 8: mod_base = OTHER; note = 2'-O-methyluridine-3'-phosphate
  modified_base 9: mod_base = OTHER; note = 2'-deoxy-2'-fluorouridine-3'-phosphate
  modified_base 10: mod_base = OTHER; note = 2'-O-methylcytidine-3'-phosphate
  modified_base 11: mod_base = OTHER; note = 2'-deoxy-2'-fluorouridine-3'-phosphate
  modified_base 12: mod_base = OTHER; note = 2'-O-methyluridine-3'-phosphate
  modified_base 13: mod_base = OTHER; note = 2'-deoxy-2'-fluoroguanosine-3'-phosphate
  modified_base 14: mod_base = OTHER; note = 2'-O-methylcytidine-3'-phosphate
  modified_base 15: mod_base = OTHER; note = 2'-deoxy-2'-fluorouridine-3'-phosphate
  modified_base 16: mod_base = OTHER; note = 2'-O-methylcytidine-3'-phosphate
  modified_base 17: mod_base = OTHER; note = 2'-deoxy-2'-fluorouridine-3'-phosphate
  modified_base 18: mod_base = OTHER; note = 2'-deoxy-2'-fluoroadenosine-3'-phosphate
  modified_base 19: mod_base = OTHER; note = 2'-deoxy-2'-fluorouridine-3'-phosphate
  modified_base 20: mod_base = OTHER; note = 2'-O-methyladenosine-3'-phosphorothioate
  modified_base 21: mod_base = OTHER; note = 2'-O-methyladenosine
aacagtgttcttgctctataa

SEQ ID NO: 423 - RNA, 21 nt, synthetic construct
  source 1..21: mol_type = other RNA
  modified_base 1: mod_base = OTHER; note = 2'-O-methyladenosine-3'-phosphate
  modified_base 2: mod_base = OTHER; note = 2'-deoxy-2'-fluoroadenosine-3'-phosphate
  modified_base 3: mod_base = OTHER; note = 2'-deoxy-2'-fluorocytidine-3'-phosphate
  modified_base 4: mod_base = OTHER; note = 2'-O-methyladenosine-3'-phosphate
  modified_base 5: mod_base = OTHER; note = 2'-O-methylguanosine-3'-phosphate
  modified_base 6: mod_base = OTHER; note = 2'-deoxy-2'-fluorouridine-3'-phosphate
  modified_base 7: mod_base = OTHER; note = 2'-deoxy-2'-fluoroguanosine-3'-phosphate
  modified_base 8: mod_base = OTHER; note = 2'-O-methyluridine-3'-phosphate
  modified_base 9: mod_base = OTHER; note = 2'-O-methyluridine-3'-phosphate
  modified_base 10: mod_base = OTHER; note = 2'-deoxy-2'-fluorocytidine-3'-phosphate
  modified_base 11: mod_base = OTHER; note = 2'-deoxy-2'-fluorouridine-3'-phosphate
  modified_base 12: mod_base = OTHER; note = 2'-O-methyluridine-3'-phosphate
  modified_base 13: mod_base = OTHER; note = 2'-O-methylguanosine-3'-phosphate
  modified_base 14: mod_base = OTHER; note = 2'-deoxy-2'-fluorocytidine-3'-phosphate
  modified_base 15: mod_base = OTHER; note = 2'-deoxy-2'-fluorouridine-3'-phosphate
  modified_base 16: mod_base = OTHER; note = 2'-O-methylcytidine-3'-phosphate
  modified_base 17: mod_base = OTHER; note = 2'-O-methyluridine-3'-phosphate
  modified_base 18: mod_base = OTHER; note = 2'-deoxy-2'-fluoroadenosine-3'-phosphate
  modified_base 19: mod_base = OTHER; note = 2'-deoxy-2'-fluorouridine-3'-phosphate
  modified_base 20: mod_base = OTHER; note = 2'-O-methyladenosine-3'-phosphorothioate
  modified_base 21: mod_base = OTHER; note = 2'-O-methyladenosine
aacagtgttcttgctctataa

SEQ ID NO: 424 - RNA, 21 nt, synthetic construct
  source 1..21: mol_type = other RNA
  modified_base 1: mod_base = OTHER; note = 2'-deoxy-2'-fluoroadenosine-3'-phosphate
  modified_base 2: mod_base = OTHER; note = 2'-O-methyladenosine-3'-phosphate
  modified_base 3: mod_base = OTHER; note = 2'-deoxy-2'-fluorocytidine-3'-phosphate
  modified_base 4: mod_base = OTHER; note = 2'-deoxy-2'-fluoroadenosine-3'-phosphate
  modified_base 5: mod_base = OTHER; note = 2'-deoxy-2'-fluoroguanosine-3'-phosphate
  modified_base 6: mod_base = OTHER; note = 2'-O-methyluridine-3'-phosphate
  modified_base 7: mod_base = OTHER; note = 2'-deoxy-2'-fluoroguanosine-3'-phosphate
  modified_base 8: mod_base = OTHER; note = 2'-O-methyluridine-3'-phosphate
  modified_base 9: mod_base = OTHER; note = 2'-deoxy-2'-fluorouridine-3'-phosphate
  modified_base 10: mod_base = OTHER; note = 2'-O-methylcytidine-3'-phosphate
  modified_base 11: mod_base = OTHER; note = 2'-deoxy-2'-fluorouridine-3'-phosphate
  modified_base 12: mod_base = OTHER; note = 2'-O-methyluridine-3'-phosphate
  modified_base 13: mod_base = OTHER; note = 2'-deoxy-2'-fluoroguanosine-3'-phosphate
  modified_base 14: mod_base = OTHER; note = 2'-O-methylcytidine-3'-phosphate
  modified_base 15: mod_base = OTHER; note = 2'-deoxy-2'-fluorouridine-3'-phosphate
  modified_base 16: mod_base = OTHER; note = 2'-O-methylcytidine-3'-phosphate
  modified_base 17: mod_base = OTHER; note = 2'-deoxy-2'-fluorouridine-3'-phosphate
  modified_base 18: mod_base = OTHER; note = 2'-O-methyladenosine-3'-phosphate
  modified_base 19: mod_base = OTHER; note = 2'-deoxy-2'-fluorouridine-3'-phosphate
  modified_base 20: mod_base = OTHER; note = 2'-O-methyladenosine-3'-phosphorothioate
  modified_base 21: mod_base = OTHER; note = 2'-deoxy-2'-fluoroadenosine
aacagtgttcttgctctataa

SEQ ID NO: 425 - RNA, 23 nt, synthetic construct
  source 1..23: mol_type = other RNA
  modified_base 1: mod_base = OTHER; note = 2'-deoxy-2'-fluoroadenosine-3'-phosphate
  modified_base 2: mod_base = OTHER; note = 2'-deoxy-2'-fluorouridine-3'-phosphate
  modified_base 3: mod_base = OTHER; note = 2'-O-methylguanosine-3'-phosphate
  modified_base 4: mod_base = OTHER; note = 2'-deoxy-2'-fluoroguanosine-3'-phosphate
  modified_base 5: mod_base = OTHER; note = 2'-O-methyladenosine-3'-phosphate
  modified_base 6: mod_base = OTHER; note = 2'-deoxy-2'-fluoroadenosine-3'-phosphate
  modified_base 7: mod_base = OTHER; note = 2'-O-methyluridine-3'-phosphate
  modified_base 8: mod_base = OTHER; note = 2'-deoxy-2'-fluoroadenosine-3'-phosphate
  modified_base 9: mod_base = OTHER; note = 2'-O-methylcytidine-3'-phosphate
  modified_base 10: mod_base = OTHER; note = 2'-deoxy-2'-fluorouridine-3'-phosphate
  modified_base 11: mod_base = OTHER; note = 2'-O-methylcytidine-3'-phosphate
  modified_base 12: mod_base = OTHER; note = 2'-O-methyluridine-3'-phosphate
  modified_base 13: mod_base = OTHER; note = 2'-O-methyluridine-3'-phosphate
  modified_base 14: mod_base = OTHER; note = 2'-deoxy-2'-fluoroguanosine-3'-phosphate
  modified_base 15: mod_base = OTHER; note = 2'-O-methylguanosine-3'-phosphate
  modified_base 16: mod_base = OTHER; note = 2'-deoxy-2'-fluorouridine-3'-phosphate
  modified_base 17: mod_base = OTHER; note = 2'-O-methyluridine-3'-phosphate
  modified_base 18: mod_base = OTHER; note = 2'-deoxy-2'-fluoroadenosine-3'-phosphate
  modified_base 19: mod_base = OTHER; note = 2'-O-methylcytidine-3'-phosphate
  modified_base 20: mod_base = OTHER; note = 2'-deoxy-2'-fluoroadenosine-3'-phosphate
  modified_base 21: mod_base = OTHER; note = 2'-O-methyluridine-3'-phosphorothioate
  modified_base 22: mod_base = OTHER; note = 2'-deoxy-2'-fluoroguanosine-3'-phosphorothioate
  modified_base 23: mod_base = OTHER; note = 2'-O-methyladenosine
atggaatactcttggttacatga

SEQ ID NO: 426 - RNA, 23 nt, synthetic construct
  source 1..23: mol_type = other RNA
  modified_base 1: mod_base = OTHER; note = 2'-O-methyladenosine-3'-phosphate
  modified_base 2: mod_base = OTHER; note = 2'-deoxy-2'-fluorouridine-3'-phosphorothioate
  modified_base 3: mod_base = OTHER; note = 2'-O-methylguanosine-3'-phosphate
  modified_base 4: mod_base = OTHER; note = 2'-deoxy-2'-fluoroguanosine-3'-phosphate
  modified_base 5: mod_base = OTHER; note = 2'-deoxy-2'-fluoroadenosine-3'-phosphate
  modified_base 6: mod_base = OTHER; note = 2'-deoxy-2'-fluoroadenosine-3'-phosphate
  modified_base 7: mod_base = OTHER; note = 2'-O-methyluridine-3'-phosphate
  modified_base 8: mod_base = OTHER; note = 2'-deoxy-2'-fluoroadenosine-3'-phosphate
  modified_base 9: mod_base = OTHER; note = 2'-O-methylcytidine-3'-phosphate
  modified_base 10: mod_base = OTHER; note = 2'-deoxy-2'-fluorouridine-3'-phosphate
  modified_base 11: mod_base = OTHER; note = 2'-O-methylcytidine-3'-phosphate
  modified_base 12: mod_base = OTHER; note = 2'-O-methyluridine-3'-phosphate
  modified_base 13: mod_base = OTHER; note = 2'-O-methyluridine-3'-phosphate
  modified_base 14: mod_base = OTHER; note = 2'-deoxy-2'-fluoroguanosine-3'-phosphate
  modified_base 15: mod_base = OTHER; note = 2'-O-methylguanosine-3'-phosphate
  modified_base 16: mod_base = OTHER; note = 2'-deoxy-2'-fluorouridine-3'-phosphate
  modified_base 17: mod_base = OTHER; note = 2'-O-methyluridine-3'-phosphate
  modified_base 18: mod_base = OTHER; note = 2'-deoxy-2'-fluoroadenosine-3'-phosphate
  modified_base 19: mod_base = OTHER; note = 2'-O-methylcytidine-3'-phosphate
  modified_base 20: mod_base = OTHER; note = 2'-deoxy-2'-fluoroadenosine-3'-phosphate
  modified_base 21: mod_base = OTHER; note = 2'-O-methyluridine-3'-phosphorothioate
  modified_base 22: mod_base = OTHER; note = 2'-deoxy-2'-fluoroguanosine-3'-phosphorothioate
  modified_base 23: mod_base = OTHER; note = 2'-O-methyladenosine
atggaatactcttggttacatga

SEQ ID NO: 427 - RNA, 23 nt, synthetic construct
  source 1..23: mol_type = other RNA
  modified_base 1: mod_base = OTHER; note = 2'-O-methyladenosine-3'-phosphate
  modified_base 2: mod_base = OTHER; note = 2'-deoxy-2'-fluorouridine-3'-phosphate
  modified_base 3: mod_base = OTHER; note = 2'-O-methylguanosine-3'-phosphate
  modified_base 4: mod_base = OTHER; note = 2'-deoxy-2'-fluoroguanosine-3'-phosphate
  modified_base 5: mod_base = OTHER; note = 2'-deoxy-2'-fluoroadenosine-3'-phosphate
  modified_base 6: mod_base = OTHER; note = 2'-deoxy-2'-fluoroadenosine-3'-phosphate
  modified_base 7: mod_base = OTHER; note = 2'-O-methyluridine-3'-phosphate
  modified_base 8: mod_base = OTHER; note = 2'-deoxy-2'-fluoroadenosine-3'-phosphate
  modified_base 9: mod_base = OTHER; note = 2'-O-methylcytidine-3'-phosphate
  modified_base 10: mod_base = OTHER; note = 2'-deoxy-2'-fluorouridine-3'-phosphate
  modified_base 11: mod_base = OTHER; note = 2'-O-methylcytidine-3'-phosphate
  modified_base 12: mod_base = OTHER; note = 2'-O-methyluridine-3'-phosphate
  modified_base 13: mod_base = OTHER; note = 2'-O-methyluridine-3'-phosphate
  modified_base 14: mod_base = OTHER; note = 2'-deoxy-2'-fluoroguanosine-3'-phosphate
  modified_base 15: mod_base = OTHER; note = 2'-O-methylguanosine-3'-phosphorothioate
  modified_base 16: mod_base = OTHER; note = 2'-deoxy-2'-fluorouridine-3'-phosphate
  modified_base 17: mod_base = OTHER; note = 2'-O-methyluridine-3'-phosphate
  modified_base 18: mod_base = OTHER; note = 2'-deoxy-2'-fluoroadenosine-3'-phosphate
  modified_base 19: mod_base = OTHER; note = 2'-O-methylcytidine-3'-phosphate
  modified_base 20: mod_base = OTHER; note = 2'-deoxy-2'-fluoroadenosine-3'-phosphate
  modified_base 21: mod_base = OTHER; note = 2'-O-methyluridine-3'-phosphorothioate
  modified_base 22: mod_base = OTHER; note = 2'-deoxy-2'-fluoroguanosine-3'-phosphorothioate
  modified_base 23: mod_base = OTHER; note = 2'-O-methyladenosine
atggaatactcttggttacatga

SEQ ID NO: 428 - RNA, 23 nt, synthetic construct
  source 1..23: mol_type = other RNA
  modified_base 1: mod_base = OTHER; note = 2'-O-methyladenosine-3'-phosphate
  modified_base 2: mod_base = OTHER; note = 2'-deoxy-2'-fluorouridine-3'-phosphate
  modified_base 3: mod_base = OTHER; note = 2'-O-methylguanosine-3'-phosphate
  modified_base 4: mod_base = OTHER; note = 2'-deoxy-2'-fluoroguanosine-3'-phosphate
  modified_base 5: mod_base = OTHER; note = 2'-deoxy-2'-fluoroadenosine-3'-phosphate
  modified_base 6: mod_base = OTHER; note = 2'-deoxy-2'-fluoroadenosine-3'-phosphate
  modified_base 7: mod_base = OTHER; note = 2'-O-methyluridine-3'-phosphate
  modified_base 8: mod_base = OTHER; note = 2'-deoxy-2'-fluoroadenosine-3'-phosphate
  modified_base 9: mod_base = OTHER; note = 2'-O-methylcytidine-3'-phosphate
  modified_base 10: mod_base = OTHER; note = 2'-deoxy-2'-fluorouridine-3'-phosphate
  modified_base 11: mod_base = OTHER; note = 2'-O-methylcytidine-3'-phosphate
  modified_base 12: mod_base = OTHER; note = 2'-O-methyluridine-3'-phosphate
  modified_base 13: mod_base = OTHER; note = 2'-O-methyluridine-3'-phosphate
  modified_base 14: mod_base = OTHER; note = 2'-deoxy-2'-fluoroguanosine-3'-phosphate
  modified_base 15: mod_base = OTHER; note = 2'-O-methylguanosine-3'-phosphate
  modified_base 16: mod_base = OTHER; note = 2'-deoxy-2'-fluorouridine-3'-phosphorothioate
  modified_base 17: mod_base = OTHER; note = 2'-O-methyluridine-3'-phosphate
  modified_base 18: mod_base = OTHER; note = 2'-deoxy-2'-fluoroadenosine-3'-phosphate
  modified_base 19: mod_base = OTHER; note = 2'-O-methylcytidine-3'-phosphate
  modified_base 20: mod_base = OTHER; note = 2'-deoxy-2'-fluoroadenosine-3'-phosphate
  modified_base 21: mod_base = OTHER; note = 2'-O-methyluridine-3'-phosphorothioate
  modified_base 22: mod_base = OTHER; note = 2'-deoxy-2'-fluoroguanosine-3'-phosphorothioate
  modified_base 23: mod_base = OTHER; note = 2'-O-methyladenosine
atggaatactcttggttacatga

SEQ ID NO: 429 - RNA, 23 nt, synthetic construct
  source 1..23: mol_type = other RNA
  modified_base 3: mod_base = OTHER; note = 2'-O-methylguanosine-3'-phosphate
  modified_base 4: mod_base = OTHER; note = 2'-O-methylguanosine-3'-phosphate
  modified_base 7: mod_base = OTHER; note = 2'-O-methyluridine-3'-phosphate
  modified_base 8: mod_base = OTHER; note = 2'-O-methyladenosine-3'-phosphate
  modified_base 11: mod_base = OTHER; note = 2'-O-methylcytidine-3'-phosphate
  modified_base 12: mod_base = OTHER; note = 2'-O-methyluridine-3'-phosphate
  modified_base 15: mod_base = OTHER; note = 2'-O-methylguanosine-3'-phosphate
  modified_base 16: mod_base = OTHER; note = 2'-O-methyluridine-3'-phosphate
  modified_base 19: mod_base = OTHER; note = 2'-O-methylcytidine-3'-phosphate
  modified_base 20: mod_base = OTHER; note = 2'-O-methyladenosine-3'-phosphate
  modified_base 21: mod_base = OTHER; note = uridine-3'-phosphorothioate
  modified_base 22: mod_base = OTHER; note = guanosine-3'-phosphorothioate
  modified_base 23: mod_base = OTHER; note = 2'-O-methyladenosine
atggaatactcttggttacatga

SEQ ID NO: 430 - RNA, 23 nt, synthetic construct
  source 1..23: mol_type = other RNA
  modified_base 1: mod_base = OTHER; note = 2'-O-methyladenosine-3'-phosphate
  modified_base 2: mod_base = OTHER; note = 2'-deoxy-2'-fluorouridine-3'-phosphate
  modified_base 3: mod_base = OTHER; note = 2'-O-methylguanosine-3'-phosphate
  modified_base 4: mod_base = OTHER; note = 2'-deoxy-2'-fluoroguanosine-3'-phosphate
  modified_base 5: mod_base = OTHER; note = 2'-deoxy-2'-fluoroadenosine-3'-phosphate
  modified_base 6: mod_base = OTHER; note = 2'-deoxy-2'-fluoroadenosine-3'-phosphate
  modified_base 7: mod_base = OTHER; note = 2'-O-methyluridine-3'-phosphate
  modified_base 8: mod_base = OTHER; note = 2'-deoxy-2'-fluoroadenosine-3'-phosphate
  modified_base 9: mod_base = OTHER; note = 2'-O-methylcytidine-3'-phosphate
  modified_base 10: mod_base = OTHER; note = 2'-deoxy-2'-fluorouridine-3'-phosphate
  modified_base 11: mod_base = OTHER; note = 2'-O-methylcytidine-3'-phosphate
  modified_base 12: mod_base = OTHER; note = 2'-O-methyluridine-3'-phosphate
  modified_base 13: mod_base = OTHER; note = 2'-O-methyluridine-3'-phosphate
  modified_base 14: mod_base = OTHER; note = 2'-deoxy-2'-fluoroguanosine-3'-phosphate
  modified_base 15: mod_base = OTHER; note = 2'-O-methylguanosine-3'-phosphorothioate
  modified_base 16: mod_base = OTHER; note = 2'-deoxy-2'-fluorouridine-3'-phosphorothioate
  modified_base 17: mod_base = OTHER; note = 2'-O-methyluridine-3'-phosphate
  modified_base 18: mod_base = OTHER; note = 2'-deoxy-2'-fluoroadenosine-3'-phosphate
  modified_base 19: mod_base = OTHER; note = 2'-O-methylcytidine-3'-phosphate
  modified_base 20: mod_base = OTHER; note = 2'-deoxy-2'-fluoroadenosine-3'-phosphate
  modified_base 21: mod_base = OTHER; note = 2'-O-methyluridine-3'-phosphorothioate
  modified_base 22: mod_base = OTHER; note = 2'-deoxy-2'-fluoroguanosine-3'-phosphorothioate
  modified_base 23: mod_base = OTHER; note = 2'-O-methyladenosine
atggaatactcttggttacatga

SEQ ID NO: 431 - RNA, 23 nt, synthetic construct
  source 1..23: mol_type = other RNA
  modified_base 1: mod_base = OTHER; note = 2'-O-methyladenosine-3'-phosphate
  modified_base 2: mod_base = OTHER; note = 2'-deoxy-2'-fluorouridine-3'-phosphate
  modified_base 3: mod_base = OTHER; note = 2'-O-methylguanosine-3'-phosphate
  modified_base 4: mod_base = OTHER; note = 2'-deoxy-2'-fluoroguanosine-3'-phosphate
  modified_base 5: mod_base = OTHER; note = 2'-O-methyladenosine-3'-phosphate
  modified_base 6: mod_base = OTHER; note = 2'-deoxy-2'-fluoroadenosine-3'-phosphate
  modified_base 7: mod_base = OTHER; note = 2'-O-methyluridine-3'-phosphate
  modified_base 8: mod_base = OTHER; note = 2'-deoxy-2'-fluoroadenosine-3'-phosphate
  modified_base 9: mod_base = OTHER; note = 2'-O-methylcytidine-3'-phosphate
  modified_base 10: mod_base = OTHER; note = 2'-deoxy-2'-fluorouridine-3'-phosphate
  modified_base 11: mod_base = OTHER; note = 2'-O-methylcytidine-3'-phosphate
  modified_base 12: mod_base = OTHER; note = 2'-O-methyluridine-3'-phosphate
  modified_base 13: mod_base = OTHER; note = 2'-O-methyluridine-3'-phosphate
  modified_base 14: mod_base = OTHER; note = 2'-deoxy-2'-fluoroguanosine-3'-phosphate
  modified_base 15: mod_base = OTHER; note = 2'-deoxy-2'-fluoroguanosine-3'-phosphate
  modified_base 16: mod_base = OTHER; note = 2'-O-methyluridine-3'-phosphate
  modified_base 17: mod_base = OTHER; note = 2'-O-methyluridine-3'-phosphate
  modified_base 18: mod_base = OTHER; note = 2'-deoxy-2'-fluoroadenosine-3'-phosphate
  modified_base 19: mod_base = OTHER; note = 2'-O-methylcytidine-3'-phosphate
  modified_base 20: mod_base = OTHER; note = 2'-deoxy-2'-fluoroadenosine-3'-phosphate
  modified_base 21: mod_base = OTHER; note = 2'-O-methyluridine-3'-phosphorothioate
  modified_base 22: mod_base = OTHER; note = 2'-deoxy-2'-fluoroguanosine-3'-phosphorothioate
  modified_base 23: mod_base = OTHER; note = 2'-O-methyladenosine
atggaatactcttggttacatga

SEQ ID NO: 432 - RNA, 23 nt, synthetic construct
  source 1..23: mol_type = other RNA
  modified_base 1: mod_base = OTHER; note = 2'-O-methyladenosine-3'-phosphate
  modified_base 2: mod_base = OTHER; note = 2'-deoxy-2'-fluorouridine-3'-phosphate
  modified_base 3: mod_base = OTHER; note = 2'-O-methylguanosine-3'-phosphate
  modified_base 4: mod_base = OTHER; note = 2'-deoxy-2'-fluoroguanosine-3'-phosphate
  modified_base 5: mod_base = OTHER; note = 2'-O-methyladenosine-3'-phosphate
  modified_base 6: mod_base = OTHER; note = 2'-deoxy-2'-fluoroadenosine-3'-phosphate
  modified_base 7: mod_base = OTHER; note = 2'-O-methyluridine-3'-phosphate
  modified_base 8: mod_base = OTHER; note = 2'-deoxy-2'-fluoroadenosine-3'-phosphate
  modified_base 9: mod_base = OTHER; note = 2'-O-methylcytidine-3'-phosphate
  modified_base 10: mod_base = OTHER; note = 2'-deoxy-2'-fluorouridine-3'-phosphate
  modified_base 11: mod_base = OTHER; note = 2'-O-methylcytidine-3'-phosphate
  modified_base 12: mod_base = OTHER; note = 2'-O-methyluridine-3'-phosphate
  modified_base 13: mod_base = OTHER; note = 2'-O-methyluridine-3'-phosphate
  modified_base 14: mod_base = OTHER; note = 2'-deoxy-2'-fluoroguanosine-3'-phosphate
  modified_base 15: mod_base = OTHER; note = 2'-O-methylguanosine-3'-phosphate
  modified_base 16: mod_base = OTHER; note = 2'-O-methyluridine-3'-phosphate
  modified_base 17: mod_base = OTHER; note = 2'-O-methyluridine-3'-phosphate
  modified_base 18: mod_base = OTHER; note = 2'-deoxy-2'-fluoroadenosine-3'-phosphate
  modified_base 19: mod_base = OTHER; note = 2'-O-methylcytidine-3'-phosphate
  modified_base 20: mod_base = OTHER; note = 2'-deoxy-2'-fluoroadenosine-3'-phosphate
  modified_base 21: mod_base = OTHER; note = 2'-O-methyluridine-3'-phosphorothioate
  modified_base 22: mod_base = OTHER; note = 2'-deoxy-2'-fluoroguanosine-3'-phosphorothioate
  modified_base 23: mod_base = OTHER; note = 2'-O-methyladenosine
atggaatactcttggttacatga

SEQ ID NO: 433 - RNA, 23 nt, synthetic construct
  source 1..23: mol_type = other RNA
  modified_base 1: mod_base = OTHER; note = 2'-O-methyladenosine-3'-phosphate
  modified_base 2: mod_base = OTHER; note = 2'-deoxy-2'-fluorouridine-3'-phosphate
  modified_base 3: mod_base = OTHER; note = 2'-O-methylguanosine-3'-phosphate
  modified_base 4: mod_base = OTHER; note = 2'-deoxy-2'-fluoroguanosine-3'-phosphate
  modified_base 5: mod_base = OTHER; note = 2'-O-methyladenosine-3'-phosphate
  modified_base 6: mod_base = OTHER; note = 2'-deoxy-2'-fluoroadenosine-3'-phosphate
  modified_base 7: mod_base = OTHER; note = 2'-O-methyluridine-3'-phosphate
  modified_base 8: mod_base = OTHER; note = 2'-deoxy-2'-fluoroadenosine-3'-phosphate
  modified_base 9: mod_base = OTHER; note = 2'-O-methylcytidine-3'-phosphate
  modified_base 10: mod_base = OTHER; note = 2'-deoxy-2'-fluorouridine-3'-phosphate
  modified_base 11: mod_base = OTHER; note = 2'-O-methylcytidine-3'-phosphate
  modified_base 12: mod_base = OTHER; note = 2'-deoxy-2'-fluorouridine-3'-phosphate
  modified_base 13: mod_base = OTHER; note = 2'-O-methyluridine-3'-phosphate
  modified_base 14: mod_base = OTHER; note = 2'-deoxy-2'-fluoroguanosine-3'-phosphate
  modified_base 15: mod_base = OTHER; note = 2'-O-methylguanosine-3'-phosphate
  modified_base 16: mod_base = OTHER; note = 2'-deoxy-2'-fluorouridine-3'-phosphate
  modified_base 17: mod_base = OTHER; note = 2'-O-methyluridine-3'-phosphate
  modified_base 18: mod_base = OTHER; note = 2'-deoxy-2'-fluoroadenosine-3'-phosphate
  modified_base 19: mod_base = OTHER; note = 2'-O-methylcytidine-3'-phosphate
  modified_base 20: mod_base = OTHER; note = 2'-deoxy-2'-fluoroadenosine-3'-phosphate
  modified_base 21: mod_base = OTHER; note = 2'-O-methyluridine-3'-phosphorothioate
  modified_base 22: mod_base = OTHER; note = 2'-deoxy-2'-fluoroguanosine-3'-phosphorothioate
  modified_base 23: mod_base = OTHER; note = 2'-O-methyladenosine
atggaatactcttggttacatga

SEQ ID NO: 434 - RNA, 23 nt, synthetic construct
  source 1..23: mol_type = other RNA
  modified_base 1: mod_base = OTHER; note = 2'-O-methyluridine-3'-phosphate
  modified_base 2: mod_base = OTHER; note = 2'-deoxy-2'-fluorocytidine-3'-phosphate
  modified_base 3: mod_base = OTHER; note = 2'-O-methyluridine-3'-phosphate
  modified_base 4: mod_base = OTHER; note = 2'-O-methyluridine-3'-phosphate
  modified_base 5: mod_base = OTHER; note = 2'-O-methylguanosine-3'-phosphate
  modified_base 6: mod_base = OTHER; note = 2'-deoxy-2'-fluoroguanosine-3'-phosphate
  modified_base 7: mod_base = OTHER; note = 2'-O-methyluridine-3'-phosphate
  modified_base 8: mod_base = OTHER; note = 2'-deoxy-2'-fluorouridine-3'-phosphate
  modified_base 9: mod_base = OTHER; note = 2'-O-methyladenosine-3'-phosphate
  modified_base 10: mod_base = OTHER; note = 2'-deoxy-2'-fluorocytidine-3'-phosphate
  modified_base 11: mod_base = OTHER; note = 2'-O-methyladenosine-3'-phosphate
  modified_base 12: mod_base = OTHER; note = 2'-O-methyluridine-3'-phosphate
  modified_base 13: mod_base = OTHER; note = 2'-O-methylguanosine-3'-phosphate
  modified_base 14: mod_base = OTHER; note = 2'-deoxy-2'-fluoroadenosine-3'-phosphate
  modified_base 15: mod_base = OTHER; note = 2'-O-methyladenosine-3'-phosphate
  modified_base 16: mod_base = OTHER; note = 2'-deoxy-2'-fluoroadenosine-3'-phosphate
  modified_base 17: mod_base = OTHER; note = 2'-O-methyluridine-3'-phosphate
  modified_base 18: mod_base = OTHER; note = 2'-O-methylcytidine-3'-phosphate
  modified_base 19: mod_base = OTHER; note = 2'-O-methylcytidine-3'-phosphate
  modified_base 20: mod_base = OTHER; note = 2'-deoxy-2'-fluorocytidine-3'-phosphate
  modified_base 21: mod_base = OTHER; note = 2'-O-methyladenosine-3'-phosphorothioate
  modified_base 22: mod_base = OTHER; note = 2'-deoxy-2'-fluorouridine-3'-phosphorothioate
  modified_base 23: mod_base = OTHER; note = 2'-O-methylcytidine
tcttggttacatgaaatcccatc

SEQ ID NO: 435 - RNA, 23 nt, synthetic construct
  source 1..23: mol_type = other RNA
  modified_base 1: mod_base = OTHER; note = 2'-O-methyluridine-3'-phosphate
  modified_base 2: mod_base = OTHER; note = 2'-deoxy-2'-fluorocytidine-3'-phosphate
  modified_base 3: mod_base = OTHER; note = 2'-O-methyluridine-3'-phosphate
  modified_base 4: mod_base = OTHER; note = 2'-deoxy-2'-fluorouridine-3'-phosphate
  modified_base 5: mod_base = OTHER; note = 2'-O-methylguanosine-3'-phosphate
  modified_base 6: mod_base = OTHER; note = 2'-deoxy-2'-fluoroguanosine-3'-phosphate
  modified_base 7: mod_base = OTHER; note = 2'-O-methyluridine-3'-phosphate
  modified_base 8: mod_base = OTHER; note = 2'-deoxy-2'-fluorouridine-3'-phosphate
  modified_base 9: mod_base = OTHER; note = 2'-O-methyladenosine-3'-phosphate
  modified_base 10: mod_base = OTHER; note = 2'-deoxy-2'-fluorocytidine-3'-phosphate
  modified_base 11: mod_base = OTHER; note = 2'-O-methyladenosine-3'-phosphate
  modified_base 12: mod_base = OTHER; note = 2'-O-methyluridine-3'-phosphate
  modified_base 13: mod_base = OTHER; note = 2'-O-methylguanosine-3'-phosphate
  modified_base 14: mod_base = OTHER; note = 2'-deoxy-2'-fluoroadenosine-3'-phosphate
  modified_base 15: mod_base = OTHER; note = 2'-O-methyladenosine-3'-phosphate
  modified_base 16: mod_base = OTHER; note = 2'-deoxy-2'-fluoroadenosine-3'-phosphate
  modified_base 17: mod_base = OTHER; note = 2'-deoxy-2'-fluorouridine-3'-phosphate
  modified_base 18: mod_base = OTHER; note = 2'-deoxy-2'-fluorocytidine-3'-phosphate
  modified_base 19: mod_base = OTHER; note = 2'-O-methylcytidine-3'-phosphate
  modified_base 20: mod_base = OTHER; note = 2'-deoxy-2'-fluorocytidine-3'-phosphate
  modified_base 21: mod_base = OTHER; note = 2'-O-methyladenosine-3'-phosphorothioate
  modified_base 22: mod_base = OTHER; note = 2'-deoxy-2'-fluorouridine-3'-phosphorothioate
  modified_base 23: mod_base = OTHER; note = 2'-O-methylcytidine
tcttggttacatgaaatcccatc

SEQ ID NO: 436 - RNA, 23 nt, synthetic construct
  source 1..23: mol_type = other RNA
  modified_base 1: mod_base = OTHER; note = 2'-O-methyladenosine-3'-phosphate
  modified_base 2: mod_base = OTHER; note = 2'-deoxy-2'-fluorouridine-3'-phosphate
  modified_base 3: mod_base = OTHER; note = 2'-O-methylguanosine-3'-phosphate
  modified_base 4: mod_base = OTHER; note = 2'-deoxy-2'-fluoroguanosine-3'-phosphate
  modified_base 5: mod_base = OTHER; note = 2'-O-methyladenosine-3'-phosphate
  modified_base 6: mod_base = OTHER; note = 2'-deoxy-2'-fluoroadenosine-3'-phosphate
  modified_base 7: mod_base = OTHER; note = 2'-O-methyluridine-3'-phosphate
  modified_base 8: mod_base = OTHER; note = 2'-deoxy-2'-fluoroadenosine-3'-phosphate
  modified_base 9: mod_base = OTHER; note = 2'-O-methylcytidine-3'-phosphate
  modified_base 10: mod_base = OTHER; note = 2'-deoxy-2'-fluorouridine-3'-phosphate
  modified_base 11: mod_base = OTHER; note = 2'-O-methylcytidine-3'-phosphate
  modified_base 12: mod_base = OTHER; note = 2'-O-methyluridine-3'-phosphate
  modified_base 13: mod_base = OTHER; note = 2'-O-methyluridine-3'-phosphate
  modified_base 14: mod_base = OTHER; note = 2'-deoxy-2'-fluoroguanosine-3'-phosphate
  modified_base 15: mod_base = OTHER; note = 2'-deoxy-2'-fluoroguanosine-3'-phosphate
  modified_base 16: mod_base = OTHER; note = 2'-O-methyluridine-3'-phosphate
  modified_base 17: mod_base = OTHER; note = 2'-O-methyluridine-3'-phosphate
  modified_base 18: mod_base = OTHER; note = 2'-deoxy-2'-fluoroadenosine-3'-phosphate
  modified_base 19: mod_base = OTHER; note = 2'-O-methylcytidine-3'-phosphate
  modified_base 20: mod_base = OTHER; note = 2'-O-methyladenosine-3'-phosphate
  modified_base 21: mod_base = OTHER; note = 2'-deoxy-2'-fluorouridine-3'-phosphorothioate
  modified_base 22: mod_base = OTHER; note = 2'-O-methylguanosine-3'-phosphorothioate
  modified_base 23: mod_base = OTHER; note = 2'-O-methyladenosine
atggaatactcttggttacatga

SEQ ID NO: 437 - RNA, 23 nt, synthetic construct
  source 1..23: mol_type = other RNA
  modified_base 1: mod_base = OTHER; note = 2'-O-methyluridine-3'-phosphate
  modified_base 2: mod_base = OTHER; note = 2'-deoxy-2'-fluorocytidine-3'-phosphate
  modified_base 3: mod_base = OTHER; note = 2'-O-methyluridine-3'-phosphate
  modified_base 4: mod_base = OTHER; note = 2'-deoxy-2'-fluorouridine-3'-phosphate
  modified_base 5: mod_base = OTHER; note = 2'-O-methylguanosine-3'-phosphate
  modified_base 6: mod_base = OTHER; note = 2'-deoxy-2'-fluoroguanosine-3'-phosphate
  modified_base 7: mod_base = OTHER; note = 2'-deoxy-2'-fluorouridine-3'-phosphate
  modified_base 8: mod_base = OTHER; note = 2'-deoxy-2'-fluorouridine-3'-phosphate
  modified_base 9: mod_base = OTHER; note = 2'-O-methyladenosine-3'-phosphate
  modified_base 10: mod_base = OTHER; note = 2'-deoxy-2'-fluorocytidine-3'-phosphate
  modified_base 11: mod_base = OTHER; note = 2'-O-methyladenosine-3'-phosphate
  modified_base 12: mod_base = OTHER; note = 2'-O-methyluridine-3'-phosphate
  modified_base 13: mod_base = OTHER; note = 2'-O-methylguanosine-3'-phosphate
  modified_base 14: mod_base = OTHER; note = 2'-deoxy-2'-fluoroadenosine-3'-phosphate
  modified_base 15: mod_base = OTHER; note = 2'-O-methyladenosine-3'-phosphate
  modified_base 16: mod_base = OTHER; note = 2'-deoxy-2'-fluoroadenosine-3'-phosphate
  modified_base 17: mod_base = OTHER; note = 2'-O-methyluridine-3'-phosphate
  modified_base 18: mod_base = OTHER; note = 2'-deoxy-2'-fluorocytidine-3'-phosphate
  modified_base 19: mod_base = OTHER; note = 2'-O-methylcytidine-3'-phosphate
  modified_base 20: mod_base = OTHER; note = 2'-deoxy-2'-fluorocytidine-3'-phosphate
  modified_base 21: mod_base = OTHER; note = 2'-O-methyladenosine-3'-phosphorothioate
  modified_base 22: mod_base = OTHER; note = 2'-deoxy-2'-fluorouridine-3'-phosphorothioate
  modified_base 23: mod_base = OTHER; note = 2'-O-methylcytidine
tcttggttacatgaaatcccatc

SEQ ID NO: 438 - DNA, 23 bp, synthetic construct
  source 1..23: mol_type = other DNA
  modified_base 1: mod_base = OTHER; note = 2'-O-methyladenosine-3'-phosphate
  modified_base 2: mod_base = OTHER; note = 2'-deoxy-2'-fluorouridine-3'-phosphate
  modified_base 3: mod_base = OTHER; note = 2'-O-methylguanosine-3'-phosphate
  modified_base 4: mod_base = OTHER; note = 2'-deoxy-2'-fluoroguanosine-3'-phosphate
  modified_base 5: mod_base = OTHER; note = 2'-O-methyladenosine-3'-phosphate
  modified_base 6: mod_base = OTHER; note = 2'-deoxy-2'-fluoroadenosine-3'-phosphate
  modified_base 7: mod_base = OTHER; note = 2'-O-methyluridine-3'-phosphate
  modified_base 8: mod_base = OTHER; note = 2'-deoxy-2'-fluoroadenosine-3'-phosphate
  modified_base 9: mod_base = OTHER; note = 2'-O-methylcytidine-3'-phosphate
  modified_base 10: mod_base = OTHER; note = 2'-deoxy-2'-fluorouridine-3'-phosphate
  modified_base 11: mod_base = OTHER; note = 2'-O-methylcytidine-3'-phosphate
  modified_base 12: mod_base = OTHER; note = 2'-deoxy-2'-fluorouridine-3'-phosphate
  modified_base 13: mod_base = OTHER; note = 2'-O-methyluridine-3'-phosphate
  modified_base 14: mod_base = OTHER; note = 2'-O-methylguanosine-3'-phosphate
  modified_base 16: mod_base = OTHER; note = 2'-O-methyluridine-3'-phosphate
  modified_base 18: mod_base = OTHER; note = 2'-O-methyladenosine-3'-phosphate
  modified_base 20: mod_base = OTHER; note = 2'-O-methyladenosine-3'-phosphate
  modified_base 21: mod_base = OTHER; note = 2'-deoxythymidine-3'-phosphorothioate
  modified_base 22: mod_base = OTHER; note = 2'-O-methylguanosine-3'-phosphorothioate
  modified_base 23: mod_base = OTHER; note = 2'-O-methyladenosine
  misc_feature 1..14: note = RNA
  misc_feature 16: note = RNA
  misc_feature 18: note = RNA
  misc_feature 20: note = RNA
  misc_feature 22..23: note = RNA
  misc_feature 15: note = DNA
  misc_feature 17: note = DNA
  misc_feature 19: note = DNA
  misc_feature 21: note = DNA
atggaatactcttggttacatga

SEQ ID NO: 439 - RNA, 23 nt, synthetic construct
  source 1..23: mol_type = other RNA
  modified_base 1: mod_base = OTHER; note = 2'-O-methyladenosine-3'-phosphate
  modified_base 2: mod_base = OTHER; note = 2'-deoxy-2'-fluorouridine-3'-phosphate
  modified_base 3: mod_base = OTHER; note = 2'-O-methylguanosine-3'-phosphate
  modified_base 4: mod_base = OTHER; note = 2'-deoxy-2'-fluoroguanosine-3'-phosphate
  modified_base 5: mod_base = OTHER; note = 2'-O-methyladenosine-3'-phosphate
  modified_base 6: mod_base = OTHER; note = 2'-deoxy-2'-fluoroadenosine-3'-phosphate
  modified_base 7: mod_base = OTHER; note = 2'-O-methyluridine-3'-phosphate
  modified_base 8: mod_base = OTHER; note = 2'-deoxy-2'-fluoroadenosine-3'-phosphate
  modified_base 9: mod_base = OTHER; note = 2'-O-methylcytidine-3'-phosphate
  modified_base 10: mod_base = OTHER; note = 2'-deoxy-2'-fluorouridine-3'-phosphate
  modified_base 11: mod_base = OTHER; note = 2'-O-methylcytidine-3'-phosphate
  modified_base 12: mod_base = OTHER; note = 2'-O-methyluridine-3'-phosphate
  modified_base 13: mod_base = OTHER; note = 2'-O-methyluridine-3'-phosphate
  modified_base 14: mod_base = OTHER; note = 2'-deoxy-2'-fluoroguanosine-3'-phosphate
  modified_base 15: mod_base = OTHER; note = 2'-O-methylguanosine-3'-phosphate
  modified_base 16: mod_base = OTHER; note = 2'-deoxy-2'-fluorouridine-3'-phosphate
  modified_base 17: mod_base = OTHER; note = 2'-deoxy-2'-fluorouridine-3'-phosphate
  modified_base 18: mod_base = OTHER; note = 2'-deoxy-2'-fluoroadenosine-3'-phosphate
  modified_base 19: mod_base = OTHER; note = 2'-O-methylcytidine-3'-phosphate
  modified_base 20: mod_base = OTHER; note = 2'-deoxy-2'-fluoroadenosine-3'-phosphate
  modified_base 21: mod_base = OTHER; note = 2'-O-methyluridine-3'-phosphorothioate
  modified_base 22: mod_base = OTHER; note = 2'-deoxy-2'-fluoroguanosine-3'-phosphorothioate
  modified_base 23: mod_base = OTHER; note = 2'-O-methyladenosine
atggaatactcttggttacatga

SEQ ID NO: 440 - DNA, 23 bp, synthetic construct
  source 1..23: mol_type = other DNA
  modified_base 2: mod_base = OTHER; note = uridine-3'-phosphate
  modified_base 4: mod_base = OTHER; note = 2'-O-methylguanosine-3'-phosphate
  modified_base 6: mod_base = OTHER; note = 2'-O-methyladenosine-3'-phosphate
  modified_base 8: mod_base = OTHER; note = 2'-deoxy-2'-fluoroadenosine-3'-phosphate
  modified_base 10: mod_base = OTHER; note = 2'-deoxy-2'-fluorouridine-3'-phosphate
  modified_base 11: mod_base = OTHER; note = 2'-O-methylcytidine-3'-phosphate
  modified_base 12: mod_base = OTHER; note = 2'-deoxy-2'-fluorouridine-3'-phosphate
  modified_base 13: mod_base = OTHER; note = 2'-O-methyluridine-3'-phosphate
  modified_base 14: mod_base = OTHER; note = 2'-deoxy-2'-fluoroguanosine-3'-phosphate
  modified_base 15: mod_base = OTHER; note = 2'-O-methylguanosine-3'-phosphate
  modified_base 16: mod_base = OTHER; note = 2'-deoxy-2'-fluorouridine-3'-phosphate
  modified_base 17: mod_base = OTHER; note = 2'-O-methyluridine-3'-phosphate
  modified_base 18: mod_base = OTHER; note = 2'-deoxy-2'-fluoroadenosine-3'-phosphate
  modified_base 19: mod_base = OTHER; note = 2'-O-methylcytidine-3'-phosphate
  modified_base 20: mod_base = OTHER; note = 2'-deoxy-2'-fluoroadenosine-3'-phosphate
  modified_base 21: mod_base = OTHER; note = 2'-O-methyluridine-3'-phosphorothioate
  modified_base 22: mod_base = OTHER; note = 2'-deoxy-2'-fluoroguanosine-3'-phosphorothioate
  modified_base 23: mod_base = OTHER; note = 2'-O-methyladenosine
  misc_feature 2: note = RNA
  misc_feature 4: note = RNA
  misc_feature 6: note = RNA
  misc_feature 8: note = RNA
  misc_feature 10..23: note = RNA
  misc_feature 1: note = DNA
  misc_feature 5: note = DNA
  misc_feature 7: note = DNA
  misc_feature 9: note = DNA
atggaatactcttggttacatga

SEQ ID NO: 441 - RNA, 23 nt, synthetic construct
  source 1..23: mol_type = other RNA
  modified_base 1: mod_base = OTHER; note = 2'-O-methyladenosine-3'-phosphate
  modified_base 2: mod_base = OTHER; note = 2'-deoxy-2'-fluorouridine-3'-phosphate
  modified_base 3: mod_base = OTHER; note = 2'-O-methylguanosine-3'-phosphate
  modified_base 4: mod_base = OTHER; note = 2'-deoxy-2'-fluoroguanosine-3'-phosphate
  modified_base 5: mod_base = OTHER; note = 2'-O-methyladenosine-3'-phosphate
  modified_base 6: mod_base = OTHER; note = 2'-deoxy-2'-fluoroadenosine-3'-phosphate
  modified_base 7: mod_base = OTHER; note = 2'-O-methyluridine-3'-phosphate
  modified_base 8: mod_base = OTHER; note = 2'-deoxy-2'-fluoroadenosine-3'-phosphate
  modified_base 9: mod_base = OTHER; note = 2'-O-methylcytidine-3'-phosphate
  modified_base 10: mod_base = OTHER; note = 2'-deoxy-2'-fluorouridine-3'-phosphate
  modified_base 11: mod_base = OTHER; note = 2'-O-methylcytidine-3'-phosphate
  modified_base 12: mod_base = OTHER; note = 2'-O-methyluridine-3'-phosphate
  modified_base 13: mod_base = OTHER; note = 2'-O-methyluridine-3'-phosphate
  modified_base 14: mod_base = OTHER; note = 2'-deoxy-2'-fluoroguanosine-3'-phosphate
  modified_base 15: mod_base = OTHER; note = 2'-O-methylguanosine-3'-phosphate
  modified_base 16: mod_base = OTHER; note = 2'-deoxy-2'-fluorouridine-3'-phosphate
  modified_base 17: mod_base = OTHER; note = 2'-O-methyluridine-3'-phosphate
  modified_base 18: mod_base = OTHER; note = 2'-deoxy-2'-fluoroadenosine-3'-phosphate
  modified_base 19: mod_base = OTHER; note = 2'-O-methylcytidine-3'-phosphate
  modified_base 20: mod_base = OTHER; note = 2'-deoxy-2'-fluoroadenosine-3'-phosphate
  modified_base 21: mod_base = OTHER; note = 2'-deoxy-2'-fluorouridine-3'-phosphorothioate
  modified_base 22: mod_base = OTHER; note = 2'-deoxy-2'-fluoroguanosine-3'-phosphorothioate
  modified_base 23: mod_base = OTHER; note = 2'-O-methyladenosine
atggaatactcttggttacatga

SEQ ID NO: 442 - RNA, 23 nt, synthetic construct
  source 1..23: mol_type = other RNA
  modified_base 1: mod_base = OTHER; note = 2'-O-methyluridine-3'-phosphate
  modified_base 2: mod_base = OTHER; note = 2'-deoxy-2'-fluorocytidine-3'-phosphate
  modified_base 3: mod_base = OTHER; note = 2'-O-methyluridine-3'-phosphate
  modified_base 4: mod_base = OTHER; note = 2'-deoxy-2'-fluorouridine-3'-phosphate
  modified_base 5: mod_base = OTHER; note = 2'-O-methylguanosine-3'-phosphate
  modified_base 6: mod_base = OTHER; note = 2'-deoxy-2'-fluoroguanosine-3'-phosphate
  modified_base 7: mod_base = OTHER; note = 2'-O-methyluridine-3'-phosphate
  modified_base 8: mod_base = OTHER; note = 2'-O-methyluridine-3'-phosphate
  modified_base 9: mod_base = OTHER; note = 2'-O-methyladenosine-3'-phosphate
  modified_base 10: mod_base = OTHER; note = 2'-deoxy-2'-fluorocytidine-3'-phosphate
  modified_base 11: mod_base = OTHER; note = 2'-O-methyladenosine-3'-phosphate
  modified_base 12: mod_base = OTHER; note = 2'-O-methyluridine-3'-phosphate
  modified_base 13: mod_base = OTHER; note = 2'-O-methylguanosine-3'-phosphate
  modified_base 14: mod_base = OTHER; note = 2'-deoxy-2'-fluoroadenosine-3'-phosphate
  modified_base 15: mod_base = OTHER; note = 2'-O-methyladenosine-3'-phosphate
  modified_base 16: mod_base = OTHER; note = 2'-deoxy-2'-fluoroadenosine-3'-phosphate
  modified_base 17: mod_base = OTHER; note = 2'-O-methyluridine-3'-phosphate
  modified_base 18: mod_base = OTHER; note = 2'-deoxy-2'-fluorocytidine-3'-phosphate
  modified_base 19: mod_base = OTHER; note = 2'-deoxy-2'-fluorocytidine-3'-phosphate
  modified_base 20: mod_base = OTHER; note = 2'-O-methylcytidine-3'-phosphate
  modified_base 21: mod_base = OTHER; note = 2'-O-methyladenosine-3'-phosphorothioate
  modified_base 22: mod_base = OTHER; note = 2'-deoxy-2'-fluorouridine-3'-phosphorothioate
  modified_base 23: mod_base = OTHER; note = 2'-O-methylcytidine
tcttggttacatgaaatcccatc

SEQ ID NO: 443 - RNA, 23 nt, synthetic construct
  source 1..23: mol_type = other RNA
  modified_base 1: mod_base = OTHER; note = 2'-O-methyladenosine-3'-phosphate
  modified_base 2: mod_base = OTHER; note = 2'-deoxy-2'-fluorouridine-3'-phosphate
  modified_base 3: mod_base = OTHER; note = 2'-O-methylguanosine-3'-phosphate
  modified_base 4: mod_base = OTHER; note = 2'-deoxy-2'-fluoroguanosine-3'-phosphate
  modified_base 5: mod_base = OTHER; note = 2'-O-methyladenosine-3'-phosphate
  modified_base 6: mod_base = OTHER; note = 2'-deoxy-2'-fluoroadenosine-3'-phosphate
  modified_base 7: mod_base = OTHER; note = 2'-O-methyluridine-3'-phosphate
  modified_base 8: mod_base = OTHER; note = 2'-deoxy-2'-fluoroadenosine-3'-phosphate
  modified_base 9: mod_base = OTHER; note = 2'-O-methylcytidine-3'-phosphate
  modified_base 10: mod_base = OTHER; note = 2'-deoxy-2'-fluorouridine-3'-phosphate
  modified_base 11: mod_base = OTHER; note = 2'-O-methylcytidine-3'-phosphate
  modified_base 12: mod_base = OTHER; note = 2'-O-methyluridine-3'-phosphate
  modified_base 13: mod_base = OTHER; note = 2'-O-methyluridine-3'-phosphate
  modified_base 14: mod_base = OTHER; note = 2'-deoxy-2'-fluoroguanosine-3'-phosphate
  modified_base 15: mod_base = OTHER; note = 2'-O-methylguanosine-3'-phosphate
  modified_base 16: mod_base = OTHER; note = 2'-deoxy-2'-fluorouridine-3'-phosphate
  modified_base 17: mod_base = OTHER; note = 2'-O-methyluridine-3'-phosphate
  modified_base 18: mod_base = OTHER; note = 2'-deoxy-2'-fluoroadenosine-3'-phosphate
  modified_base 19: mod_base = OTHER; note = 2'-deoxy-2'-fluorocytidine-3'-phosphate
  modified_base 20: mod_base = OTHER; note = 2'-deoxy-2'-fluoroadenosine-3'-phosphate
  modified_base 21: mod_base = OTHER; note = 2'-O-methyluridine-3'-phosphorothioate
  modified_base 22: mod_base = OTHER; note = 2'-deoxy-2'-fluoroguanosine-3'-phosphorothioate
  modified_base 23: mod_base = OTHER; note = 2'-O-methyladenosine
atggaatactcttggttacatga

SEQ ID NO: 444 - RNA, 23 nt, synthetic construct
  source 1..23: mol_type = other RNA
  modified_base 1: mod_base = OTHER; note = 2'-O-methyladenosine-3'-phosphate
  modified_base 2: mod_base = OTHER; note = 2'-deoxy-2'-fluorouridine-3'-phosphate
  modified_base 3: mod_base = OTHER; note = 2'-O-methylguanosine-3'-phosphate
  modified_base 4: mod_base = OTHER; note = 2'-deoxy-2'-fluoroguanosine-3'-phosphate
  modified_base 5: mod_base = OTHER; note = 2'-O-methyladenosine-3'-phosphate
  modified_base 6: mod_base = OTHER; note = 2'-deoxy-2'-fluoroadenosine-3'-phosphate
  modified_base 7: mod_base = OTHER; note = 2'-O-methyluridine-3'-phosphate
  modified_base 8: mod_base = OTHER; note = 2'-deoxy-2'-fluoroadenosine-3'-phosphate
  modified_base 9: mod_base = OTHER; note = 2'-O-methylcytidine-3'-phosphate
  modified_base 10: mod_base = OTHER; note = 2'-deoxy-2'-fluorouridine-3'-phosphate
  modified_base 11: mod_base = OTHER; note = 2'-O-methylcytidine-3'-phosphate
  modified_base 12: mod_base = OTHER; note = 2'-O-methyluridine-3'-phosphate
  modified_base 13: mod_base = OTHER; note = 2'-O-methyluridine-3'-phosphate
  modified_base 14: mod_base = OTHER; note = 2'-deoxy-2'-fluoroguanosine-3'-phosphate
  modified_base 15: mod_base = OTHER; note = 2'-deoxy-2'-fluoroguanosine-3'-phosphate
  modified_base 16: mod_base = OTHER; note = 2'-deoxy-2'-fluorouridine-3'-phosphate
  modified_base 17: mod_base = OTHER; note = 2'-O-methyluridine-3'-phosphate
  modified_base 18: mod_base = OTHER; note = 2'-deoxy-2'-fluoroadenosine-3'-phosphate
  modified_base 19: mod_base = OTHER; note = 2'-O-methylcytidine-3'-phosphate
  modified_base 20: mod_base = OTHER; note = 2'-deoxy-2'-fluoroadenosine-3'-phosphate
  modified_base 21: mod_base = OTHER; note = 2'-O-methyluridine-3'-phosphorothioate
  modified_base 22: mod_base = OTHER; note = 2'-deoxy-2'-fluoroguanosine-3'-phosphorothioate
  modified_base 23: mod_base = OTHER; note = 2'-O-methyladenosine
atggaatactcttggttacatga

SEQ ID NO: 445 - RNA, 23 nt, synthetic construct
  source 1..23: mol_type = other RNA
  modified_base 1: mod_base = OTHER; note = 2'-O-methyladenosine-3'-phosphorothioate
  modified_base 2: mod_base = OTHER; note = 2'-deoxy-2'-fluorouridine-3'-phosphorothioate
  modified_base 3: mod_base = OTHER; note = 2'-O-methylguanosine-3'-phosphate
  modified_base 4: mod_base = OTHER; note = 2'-deoxy-2'-fluoroguanosine-3'-phosphate
  modified_base 5: mod_base = OTHER; note = 2'-deoxy-2'-fluoroadenosine-3'-phosphate
  modified_base 6: mod_base = OTHER; note = 2'-deoxy-2'-fluoroadenosine-3'-phosphate
  modified_base 7: mod_base = OTHER; note = 2'-O-methyluridine-3'-phosphate
  modified_base 8: mod_base = OTHER; note = 2'-deoxy-2'-fluoroadenosine-3'-phosphate
  modified_base 9: mod_base = OTHER; note = 2'-O-methylcytidine-3'-phosphate
  modified_base 10: mod_base = OTHER; note = 2'-deoxy-2'-fluorouridine-3'-phosphate
  modified_base 11: mod_base = OTHER; note = 2'-O-methylcytidine-3'-phosphate
  modified_base 12: mod_base = OTHER; note = 2'-O-methyluridine-3'-phosphate
  modified_base 13: mod_base = OTHER; note = 2'-O-methyluridine-3'-phosphate
  modified_base 14: mod_base = OTHER; note = 2'-deoxy-2'-fluoroguanosine-3'-phosphate
  modified_base 15: mod_base = OTHER; note = 2'-O-methylguanosine-3'-phosphate
  modified_base 16: mod_base = OTHER; note = 2'-deoxy-2'-fluorouridine-3'-phosphate
  modified_base 17: mod_base = OTHER; note = 2'-O-methyluridine-3'-phosphate
  modified_base 18: mod_base = OTHER; note = 2'-deoxy-2'-fluoroadenosine-3'-phosphate
  modified_base 19: mod_base = OTHER; note = 2'-O-methylcytidine-3'-phosphate
  modified_base 20: mod_base = OTHER; note = 2'-deoxy-2'-fluoroadenosine-3'-phosphate
  modified_base 21: mod_base = OTHER; note = 2'-O-methyluridine-3'-phosphorothioate
  modified_base 22: mod_base = OTHER; note = 2'-deoxy-2'-fluoroguanosine-3'-phosphorothioate
  modified_base 23: mod_base = OTHER; note = 2'-O-methyladenosine
atggaatactcttggttacatga

SEQ ID NO: 446 - RNA, 23 nt, synthetic construct
  source 1..23: mol_type = other RNA
  modified_base 1: mod_base = OTHER; note = 2'-O-methyladenosine-3'-phosphate
  modified_base 2: mod_base = OTHER; note = 2'-deoxy-2'-fluorouridine-3'-phosphate
  modified_base 3: mod_base = OTHER; note = 2'-deoxy-2'-fluoroguanosine-3'-phosphate
  modified_base 4: mod_base = OTHER; note = 2'-O-methylguanosine-3'-phosphate
  modified_base 5: mod_base = OTHER; note = 2'-deoxy-2'-fluoroadenosine-3'-phosphate
  modified_base 6: mod_base = OTHER; note = 2'-O-methyladenosine-3'-phosphate
  modified_base 7: mod_base = OTHER; note = 2'-deoxy-2'-fluorouridine-3'-phosphate
  modified_base 8: mod_base = OTHER; note = 2'-O-methyladenosine-3'-phosphate
  modified_base 9: mod_base = OTHER; note = 2'-deoxy-2'-fluorocytidine-3'-phosphate
  modified_base 10: mod_base = OTHER; note = 2'-deoxy-2'-fluorouridine-3'-phosphate
  modified_base 11: mod_base = OTHER; note = 2'-deoxy-2'-fluorocytidine-3'-phosphate
  modified_base 12: mod_base = OTHER; note = 2'-O-methyluridine-3'-phosphate
  modified_base 13: mod_base = OTHER; note = 2'-O-methyluridine-3'-phosphate
  modified_base 14: mod_base = OTHER; note = 2'-deoxy-2'-fluoroguanosine-3'-phosphate
  modified_base 15: mod_base = OTHER; note = 2'-deoxy-2'-fluoroguanosine-3'-phosphate
  modified_base 16: mod_base = OTHER; note = 2'-O-methyluridine-3'-phosphate
  modified_base 17: mod_base = OTHER; note = 2'-O-methyluridine-3'-phosphate
  modified_base 18: mod_base = OTHER; note = 2'-deoxy-2'-fluoroadenosine-3'-phosphate
  modified_base 19: mod_base = OTHER; note = 2'-deoxy-2'-fluorocytidine-3'-phosphate
  modified_base 20: mod_base = OTHER; note = 2'-O-methyladenosine-3'-phosphate
  modified_base 21: mod_base = OTHER; note = 2'-deoxy-2'-fluorouridine-3'-phosphorothioate
  modified_base 22: mod_base = OTHER; note = 2'-O-methylguanosine-3'-phosphorothioate
  modified_base 23: mod_base = OTHER; note = 2'-O-methyladenosine
atggaatactcttggttacatga

SEQ ID NO: 447 - DNA, 23 bp, synthetic construct
  source 1..23: mol_type = other DNA
  modified_base 1: mod_base = OTHER; note = 2'-O-methyluridine-3'-phosphate
  modified_base 4: mod_base = OTHER; note = 2'-O-methyluridine-3'-phosphate
  modified_base 5: mod_base = OTHER; note = 2'-O-methylguanosine-3'-phosphate
  modified_base 8: mod_base = OTHER; note = 2'-O-methyluridine-3'-phosphate
  modified_base 9: mod_base = OTHER; note = 2'-O-methyladenosine-3'-phosphate
  modified_base 12: mod_base = OTHER; note = 2'-O-methyluridine-3'-phosphate
  modified_base 13: mod_base = OTHER; note = 2'-O-methylguanosine-3'-phosphate
  modified_base 16: mod_base = OTHER; note = 2'-O-methyladenosine-3'-phosphate
  modified_base 17: mod_base = OTHER; note = 2'-O-methyluridine-3'-phosphate
  modified_base 20: mod_base = OTHER; note = 2'-O-methylcytidine-3'-phosphate
  modified_base 21: mod_base = OTHER; note = 2'-O-methyladenosine-3'-phosphorothioate
  modified_base 22: mod_base = OTHER; note = 2'-deoxythymidine-3'-phosphorothioate
  modified_base 23: mod_base = OTHER; note = 2'-O-methylcytidine
  misc_feature 1: note = RNA
  misc_feature 4..5: note = RNA
  misc_feature 8..9: note = RNA
  misc_feature 12..13: note = RNA
  misc_feature 16..17: note = RNA
  misc_feature 20..21: note = RNA
  misc_feature 23: note = RNA
  misc_feature 2..3: note = DNA
  misc_feature 6..7: note = DNA
  misc_feature 10..11: note = DNA
  misc_feature 14..15: note = DNA
  misc_feature 18..19: note = DNA
  misc_feature 22: note = DNA
tcttggttacatgaaatcccatc

SEQ ID NO: 448 - RNA, 23 nt, synthetic construct
  source 1..23: mol_type = other RNA
  modified_base 1: mod_base = OTHER; note = 2'-O-methyladenosine-3'-phosphate
  modified_base 2: mod_base = OTHER; note = 2'-deoxy-2'-fluorouridine-3'-phosphate
  modified_base 3: mod_base = OTHER; note = 2'-O-methylguanosine-3'-phosphorothioate
  modified_base 4: mod_base = OTHER; note = 2'-deoxy-2'-fluoroguanosine-3'-phosphate
  modified_base 5: mod_base = OTHER; note = 2'-deoxy-2'-fluoroadenosine-3'-phosphate
  modified_base 6: mod_base = OTHER; note = 2'-deoxy-2'-fluoroadenosine-3'-phosphate
  modified_base 7: mod_base = OTHER; note = 2'-O-methyluridine-3'-phosphate
  modified_base 8: mod_base = OTHER; note = 2'-deoxy-2'-fluoroadenosine-3'-phosphate
  modified_base 9: mod_base = OTHER; note = 2'-O-methylcytidine-3'-phosphate
  modified_base 10: mod_base = OTHER; note = 2'-deoxy-2'-fluorouridine-3'-phosphate
  modified_base 11: mod_base = OTHER; note = 2'-O-methylcytidine-3'-phosphate
  modified_base 12: mod_base = OTHER; note = 2'-O-methyluridine-3'-phosphate
  modified_base 13: mod_base = OTHER; note = 2'-O-methyluridine-3'-phosphate
  modified_base 14: mod_base = OTHER; note = 2'-deoxy-2'-fluoroguanosine-3'-phosphate
  modified_base 15: mod_base = OTHER; note = 2'-O-methylguanosine-3'-phosphate
  modified_base 16: mod_base = OTHER; note = 2'-deoxy-2'-fluorouridine-3'-phosphate
  modified_base 17: mod_base = OTHER; note = 2'-O-methyluridine-3'-phosphate
  modified_base 18: mod_base = OTHER; note = 2'-deoxy-2'-fluoroadenosine-3'-phosphate
  modified_base 19: mod_base = OTHER; note = 2'-O-methylcytidine-3'-phosphate
  modified_base 20: mod_base = OTHER; note = 2'-deoxy-2'-fluoroadenosine-3'-phosphate
  modified_base 21: mod_base = OTHER; note = 2'-O-methyluridine-3'-phosphorothioate
  modified_base 22: mod_base = OTHER; note = 2'-deoxy-2'-fluoroguanosine-3'-phosphorothioate
  modified_base 23: mod_base = OTHER; note = 2'-O-methyladenosine
atggaatactcttggttacatga

SEQ ID NO: 449 - RNA, 23 nt, synthetic construct
  source 1..23: mol_type = other RNA
  modified_base 1: mod_base = OTHER; note = 2'-O-methyluridine-3'-phosphate
  modified_base 2: mod_base = OTHER; note = 2'-deoxy-2'-fluorocytidine-3'-phosphate
  modified_base 3: mod_base = OTHER; note = 2'-O-methyluridine-3'-phosphate
  modified_base 4: mod_base = OTHER; note = 2'-deoxy-2'-fluorouridine-3'-phosphate
  modified_base 5: mod_base = OTHER; note = 2'-O-methylguanosine-3'-phosphate
  modified_base 6: mod_base = OTHER; note = 2'-deoxy-2'-fluoroguanosine-3'-phosphate
  modified_base 7: mod_base = OTHER; note = 2'-O-methyluridine-3'-phosphate
  modified_base 8: mod_base = OTHER; note = 2'-deoxy-2'-fluorouridine-3'-phosphate
  modified_base 9: mod_base = OTHER; note = 2'-deoxy-2'-fluoroadenosine-3'-phosphate
  modified_base 10: mod_base = OTHER; note = 2'-deoxy-2'-fluorocytidine-3'-phosphate
  modified_base 11: mod_base = OTHER; note = 2'-O-methyladenosine-3'-phosphate
  modified_base 12: mod_base = OTHER; note = 2'-O-methyluridine-3'-phosphate
  modified_base 13: mod_base = OTHER; note = 2'-O-methylguanosine-3'-phosphate
  modified_base 14: mod_base = OTHER; note = 2'-deoxy-2'-fluoroadenosine-3'-phosphate
  modified_base 15: mod_base = OTHER; note = 2'-O-methyladenosine-3'-phosphate
  modified_base 16: mod_base = OTHER; note = 2'-deoxy-2'-fluoroadenosine-3'-phosphate
  modified_base 17: mod_base = OTHER; note = 2'-O-methyluridine-3'-phosphate
  modified_base 18: mod_base = OTHER; note = 2'-deoxy-2'-fluorocytidine-3'-phosphate
  modified_base 19: mod_base = OTHER; note = 2'-O-methylcytidine-3'-phosphate
  modified_base 20: mod_base = OTHER; note = 2'-deoxy-2'-fluorocytidine-3'-phosphate
  modified_base 21: mod_base = OTHER; note = 2'-O-methyladenosine-3'-phosphorothioate
  modified_base 22: mod_base = OTHER; note = 2'-deoxy-2'-fluorouridine-3'-phosphorothioate
  modified_base 23: mod_base = OTHER; note = 2'-O-methylcytidine
tcttggttacatgaaatcccatc

SEQ ID NO: 450 - RNA, 23 nt, synthetic construct
  source 1..23: mol_type = other RNA
  modified_base 1: mod_base = OTHER; note = 2'-O-methyluridine-3'-phosphate
  modified_base 2: mod_base = OTHER; note = 2'-deoxy-2'-fluorocytidine-3'-phosphate
  modified_base 3: mod_base = OTHER; note = 2'-O-methyluridine-3'-phosphate
  modified_base 4: mod_base = OTHER; note = 2'-deoxy-2'-fluorouridine-3'-phosphate
  modified_base 5: mod_base = OTHER; note = 2'-O-methylguanosine-3'-phosphate
  modified_base 6: mod_base = OTHER; note = 2'-deoxy-2'-fluoroguanosine-3'-phosphate
  modified_base 7: mod_base = OTHER; note = 2'-O-methyluridine-3'-phosphate
  modified_base 8: mod_base = OTHER; note = 2'-O-methyluridine-3'-phosphate
  modified_base 9: mod_base = OTHER; note = 2'-O-methyladenosine-3'-phosphate
  modified_base 10: mod_base = OTHER; note = 2'-deoxy-2'-fluorocytidine-3'-phosphate
  modified_base 11: mod_base = OTHER; note = 2'-O-methyladenosine-3'-phosphate
  modified_base 12: mod_base = OTHER; note = 2'-O-methyluridine-3'-phosphate
  modified_base 13: mod_base = OTHER; note = 2'-O-methylguanosine-3'-phosphate
  modified_base 14: mod_base = OTHER; note = 2'-deoxy-2'-fluoroadenosine-3'-phosphate
  modified_base 15: mod_base = OTHER; note = 2'-O-methyladenosine-3'-phosphate
  modified_base 16: mod_base = OTHER; note = 2'-deoxy-2'-fluoroadenosine-3'-phosphate
  modified_base 17: mod_base = OTHER; note = 2'-O-methyluridine-3'-phosphate
  modified_base 18: mod_base = OTHER; note = 2'-deoxy-2'-fluorocytidine-3'-phosphate
  modified_base 19: mod_base = OTHER; note = 2'-O-methylcytidine-3'-phosphate
  modified_base 20: mod_base = OTHER; note = 2'-deoxy-2'-fluorocytidine-3'-phosphate
  modified_base 21: mod_base = OTHER; note = 2'-O-methyladenosine-3'-phosphorothioate
  modified_base 22: mod_base = OTHER; note = 2'-deoxy-2'-fluorouridine-3'-phosphorothioate
  modified_base 23: mod_base = OTHER; note = 2'-O-methylcytidine
tcttggttacatgaaatcccatc

SEQ ID NO: 451 - RNA, 23 nt, synthetic construct
  source 1..23: mol_type = other RNA
  modified_base 1: mod_base = OTHER; note = 2'-O-methyluridine-3'-phosphate
  modified_base 2: mod_base = OTHER; note = 2'-deoxy-2'-fluorocytidine-3'-phosphate
  modified_base 3: mod_base = OTHER; note = 2'-O-methyluridine-3'-phosphate
  modified_base 4: mod_base = OTHER; note = 2'-deoxy-2'-fluorouridine-3'-phosphate
  modified_base 5: mod_base = OTHER; note = 2'-O-methylguanosine-3'-phosphate
  modified_base 6: mod_base = OTHER; note = 2'-deoxy-2'-fluoroguanosine-3'-phosphate
  modified_base 7: mod_base = OTHER; note = 2'-O-methyluridine-3'-phosphate
  modified_base 8: mod_base = OTHER; note = 2'-deoxy-2'-fluorouridine-3'-phosphate
  modified_base 9: mod_base = OTHER; note = 2'-O-methyladenosine-3'-phosphate
  modified_base 10: mod_base = OTHER; note = 2'-deoxy-2'-fluorocytidine-3'-phosphate
  modified_base 11: mod_base = OTHER; note = 2'-O-methyladenosine-3'-phosphate
  modified_base 12: mod_base = OTHER; note = 2'-O-methyluridine-3'-phosphate
  modified_base 13: mod_base = OTHER; note = 2'-O-methylguanosine-3'-phosphate
  modified_base 14: mod_base = OTHER; note = 2'-deoxy-2'-fluoroadenosine-3'-phosphate
  modified_base 15: mod_base = OTHER; note = 2'-O-methyladenosine-3'-phosphate
  modified_base 16: mod_base = OTHER; note = 2'-deoxy-2'-fluoroadenosine-3'-phosphate
  modified_base 17: mod_base = OTHER; note = 2'-O-methyluridine-3'-phosphate
  modified_base 18: mod_base = OTHER; note = 2'-deoxy-2'-fluorocytidine-3'-phosphate
  modified_base 19: mod_base = OTHER; note = 2'-O-methylcytidine-3'-phosphate
  modified_base 20: mod_base = OTHER; note = 2'-deoxy-2'-fluorocytidine-3'-phosphate
  modified_base 21: mod_base = OTHER; note = 2'-O-methyladenosine-3'-phosphorothioate
  modified_base 22: mod_base = OTHER; note = 2'-deoxy-2'-fluorouridine-3'-phosphorothioate
  modified_base 23: mod_base = OTHER; note = 2'-O-methylcytidine
tcttggttacatgaaatcccatc

SEQ ID NO: 452 - RNA, 23 nt, synthetic construct
  source 1..23: mol_type = other RNA
  modified_base 1: mod_base = OTHER; note = 2'-O-methyluridine-3'-phosphate
  modified_base 2: mod_base = OTHER; note = 2'-deoxy-2'-fluorocytidine-3'-phosphate
  modified_base 3: mod_base = OTHER; note = 2'-O-methyluridine-3'-phosphate
  modified_base 4: mod_base = OTHER; note = 2'-deoxy-2'-fluorouridine-3'-phosphate
  modified_base 5: mod_base = OTHER; note = 2'-deoxy-2'-fluoroguanosine-3'-phosphate
  modified_base 6: mod_base = OTHER; note = 2'-deoxy-2'-fluoroguanosine-3'-phosphate
  modified_base 7: mod_base = OTHER; note = 2'-O-methyluridine-3'-phosphate
  modified_base 8: mod_base = OTHER; note = 2'-deoxy-2'-fluorouridine-3'-phosphate
  modified_base 9: mod_base = OTHER; note = 2'-O-methyladenosine-3'-phosphate
  modified_base 10: mod_base = OTHER; note = 2'-deoxy-2'-fluorocytidine-3'-phosphate
  modified_base 11: mod_base = OTHER; note = 2'-O-methyladenosine-3'-phosphate
  modified_base 12: mod_base = OTHER; note = 2'-O-methyluridine-3'-phosphate
  modified_base 13: mod_base = OTHER; note = 2'-O-methylguanosine-3'-phosphate
  modified_base 14: mod_base = OTHER; note = 2'-deoxy-2'-fluoroadenosine-3'-phosphate
  modified_base 15: mod_base = OTHER; note = 2'-O-methyladenosine-3'-phosphate
  modified_base 16: mod_base = OTHER; note = 2'-deoxy-2'-fluoroadenosine-3'-phosphate
  modified_base 17: mod_base = OTHER; note = 2'-O-methyluridine-3'-phosphate
  modified_base 18: mod_base = OTHER; note = 2'-deoxy-2'-fluorocytidine-3'-phosphate
  modified_base 19: mod_base = OTHER; note = 2'-O-methylcytidine-3'-phosphate
  modified_base 20: mod_base = OTHER; note = 2'-deoxy-2'-fluorocytidine-3'-phosphate
  modified_base 21: mod_base = OTHER; note = 2'-O-methyladenosine-3'-phosphorothioate
  modified_base 22: mod_base = OTHER; note = 2'-deoxy-2'-fluorouridine-3'-phosphorothioate
  modified_base 23: mod_base = OTHER; note = 2'-O-methylcytidine
tcttggttacatgaaatcccatc

SEQ ID NO: 453 - DNA, 23 bp, synthetic construct
  source 1..23: mol_type = other DNA
  modified_base 1: mod_base = OTHER; note = 2'-O-methyladenosine-3'-phosphate
  modified_base 4: mod_base = OTHER; note = 2'-O-methylguanosine-3'-phosphate
  modified_base 5: mod_base = OTHER; note = 2'-O-methyladenosine-3'-phosphate
  modified_base 8: mod_base = OTHER; note = 2'-O-methyladenosine-3'-phosphate
  modified_base 9: mod_base = OTHER; note = 2'-O-methylcytidine-3'-phosphate
  modified_base 12: mod_base = OTHER; note = 2'-O-methyluridine-3'-phosphate
  modified_base 13: mod_base = OTHER; note = 2'-O-methyluridine-3'-phosphate
  modified_base 16: mod_base = OTHER; note = 2'-O-methyluridine-3'-phosphate
  modified_base 17: mod_base = OTHER; note = 2'-O-methyluridine-3'-phosphate
  modified_base 20: mod_base = OTHER; note = 2'-O-methyladenosine-3'-phosphate
  modified_base 21: mod_base = OTHER; note = 2'-O-methyluridine-3'-phosphorothioate
  modified_base 22: mod_base = OTHER; note = 2'-deoxyguanosine-3'-phosphorothioate
  modified_base 23: mod_base = OTHER; note = 2'-O-methyladenosine
  misc_feature 1: note = RNA
  misc_feature 4..5: note = RNA
  misc_feature 8..9: note = RNA
  misc_feature 12..13: note = RNA
  misc_feature 16..17: note = RNA
  misc_feature 20..21: note = RNA
  misc_feature 23: note = RNA
  misc_feature 2..3: note = DNA
  misc_feature 6..7: note = DNA
  misc_feature 10..11: note = DNA
  misc_feature 14..15: note = DNA
  misc_feature 18..19: note = DNA
  misc_feature 22: note = DNA
atggaatactcttggttacatga

SEQ ID NO: 454 - DNA, 23 bp, synthetic construct
  source 1..23: mol_type = other DNA
  modified_base 2: mod_base = OTHER; note = uridine-3'-phosphate
  modified_base 4: mod_base = OTHER; note = guanosine-3'-phosphate
  modified_base 6: mod_base = OTHER; note = adenosine-3'-phosphate
  modified_base 8: mod_base = OTHER; note = adenosine-3'-phosphate
  modified_base 10: mod_base = OTHER; note = uridine-3'-phosphate
  modified_base 12: mod_base = OTHER; note = uridine-3'-phosphate
  modified_base 14: mod_base = OTHER; note = guanosine-3'-phosphate
  modified_base 16: mod_base = OTHER; note = uridine-3'-phosphate
  modified_base 18: mod_base = OTHER; note = adenosine-3'-phosphate
  modified_base 20: mod_base = OTHER; note = adenosine-3'-phosphate
  modified_base 21: mod_base = OTHER; note = 2'-deoxythymidine-3'-phosphorothioate
  modified_base 22: mod_base = OTHER; note = guanosine-3'-phosphorothioate
  misc_feature 2: note = RNA
  misc_feature 4: note = RNA
  misc_feature 6: note = RNA
  misc_feature 8: note = RNA
  misc_feature 10: note = RNA
  misc_feature 12: note = RNA
  misc_feature 14: note = RNA
  misc_feature 16: note = RNA
  misc_feature 18: note = RNA
  misc_feature 20: note = RNA
  misc_feature 22: note = RNA
  misc_feature 1: note = DNA
  misc_feature 5: note = DNA
  misc_feature 7: note = DNA
  misc_feature 9: note = DNA
  misc_feature 11: note = DNA
  misc_feature 13: note = DNA
  misc_feature 15: note = DNA
  misc_feature 17: note = DNA
  misc_feature 19: note = DNA
  misc_feature 21: note = DNA
  misc_feature 23: note = DNA
atggaatactcttggttacatga

SEQ ID NO: 455 - RNA, 23 nt, synthetic construct
  source 1..23: mol_type = other RNA
  modified_base 1: mod_base = OTHER; note = 2'-O-methyluridine-3'-phosphate
  modified_base 2: mod_base = OTHER; note = 2'-deoxy-2'-fluorocytidine-3'-phosphate
  modified_base 3: mod_base = OTHER; note = 2'-O-methyluridine-3'-phosphate
  modified_base 4: mod_base = OTHER; note = 2'-deoxy-2'-fluorouridine-3'-phosphate
  modified_base 5: mod_base = OTHER; note = 2'-O-methylguanosine-3'-phosphate
  modified_base 6: mod_base = OTHER; note = 2'-deoxy-2'-fluoroguanosine-3'-phosphate
  modified_base 7: mod_base = OTHER; note = 2'-O-methyluridine-3'-phosphate
  modified_base 8: mod_base = OTHER; note = 2'-deoxy-2'-fluorouridine-3'-phosphate
  modified_base 9: mod_base = OTHER; note = 2'-O-methyladenosine-3'-phosphate
  modified_base 10: mod_base = OTHER; note = 2'-deoxy-2'-fluorocytidine-3'-phosphate
  modified_base 11: mod_base = OTHER; note = 2'-O-methyladenosine-3'-phosphate
  modified_base 12: mod_base = OTHER; note = 2'-O-methyluridine-3'-phosphate
  modified_base 13: mod_base = OTHER; note = 2'-O-methylguanosine-3'-phosphate
  modified_base 14: mod_base = OTHER; note = 2'-deoxy-2'-fluoroadenosine-3'-phosphate
  modified_base 15: mod_base = OTHER; note = 2'-deoxy-2'-fluoroadenosine-3'-phosphate
  modified_base 16: mod_base = OTHER; note = 2'-deoxy-2'-fluoroadenosine-3'-phosphate
  modified_base 17: mod_base = OTHER; note = 2'-O-methyluridine-3'-phosphate
  modified_base 18: mod_base = OTHER; note = 2'-O-methylcytidine-3'-phosphate
  modified_base 19: mod_base = OTHER; note = 2'-O-methylcytidine-3'-phosphate
  modified_base 20: mod_base = OTHER; note = 2'-deoxy-2'-fluorocytidine-3'-phosphate
  modified_base 21: mod_base = OTHER; note = 2'-O-methyladenosine-3'-phosphorothioate
  modified_base 22: mod_base = OTHER; note = 2'-deoxy-2'-fluorouridine-3'-phosphorothioate
  modified_base 23: mod_base = OTHER; note = 2'-O-methylcytidine
tcttggttacatgaaatcccatc

SEQ ID NO: 456 - RNA, 23 nt, synthetic construct
  source 1..23: mol_type = other RNA
  modified_base 1: mod_base = OTHER; note = 2'-deoxy-2'-fluoroadenosine-3'-phosphate
  modified_base 2: mod_base = OTHER; note = 2'-deoxy-2'-fluorouridine-3'-phosphate
  modified_base 3: mod_base = OTHER; note = 2'-deoxy-2'-fluoroguanosine-3'-phosphate
  modified_base 4: mod_base = OTHER; note = 2'-deoxy-2'-fluoroguanosine-3'-phosphate
  modified_base 5: mod_base = OTHER; note = 2'-deoxy-2'-fluoroadenosine-3'-phosphate
  modified_base 6: mod_base = OTHER; note = 2'-deoxy-2'-fluoroadenosine-3'-phosphate
  modified_base 7: mod_base = OTHER; note = 2'-O-methyluridine-3'-phosphate
  modified_base 8: mod_base = OTHER; note = 2'-deoxy-2'-fluoroadenosine-3'-phosphate
  modified_base 9: mod_base = OTHER; note = 2'-deoxy-2'-fluorocytidine-3'-phosphate
  modified_base 10: mod_base = OTHER; note = 2'-deoxy-2'-fluorouridine-3'-phosphate
  modified_base 11: mod_base = OTHER; note = 2'-deoxy-2'-fluorocytidine-3'-phosphate
  modified_base 12: mod_base = OTHER; note = 2'-deoxy-2'-fluorouridine-3'-phosphate
  modified_base 13: mod_base = OTHER; note = 2'-O-methyluridine-3'-phosphate
  modified_base 14: mod_base = OTHER; note = 2'-deoxy-2'-fluoroguanosine-3'-phosphate
  modified_base 15: mod_base = OTHER; note = 2'-deoxy-2'-fluoroguanosine-3'-phosphate
  modified_base 16: mod_base = OTHER; note = 2'-O-methyluridine-3'-phosphate
  modified_base 17: mod_base = OTHER; note = 2'-O-methyluridine-3'-phosphate
  modified_base 18: mod_base = OTHER; note = 2'-deoxy-2'-fluoroadenosine-3'-phosphate
  modified_base 19: mod_base = OTHER; note = 2'-O-methylcytidine-3'-phosphate
  modified_base 20: mod_base = OTHER; note = 2'-deoxy-2'-fluoroadenosine-3'-phosphate
  modified_base 21: mod_base = OTHER; note = 2'-O-methyluridine-3'-phosphorothioate
  modified_base 22: mod_base = OTHER; note = 2'-deoxy-2'-fluoroguanosine-3'-phosphorothioate
  modified_base 23: mod_base = OTHER; note = 2'-O-methyladenosine
atggaatactcttggttacatga

SEQ ID NO: 457 - RNA, 23 nt, synthetic construct
  source 1..23: mol_type = other RNA
  modified_base 1: mod_base = OTHER; note = 2'-O-methyladenosine-3'-phosphorothioate
  modified_base 2: mod_base = OTHER; note = 2'-deoxy-2'-fluorouridine-3'-phosphate
  modified_base 3: mod_base = OTHER; note = 2'-O-methylguanosine-3'-phosphate
  modified_base 4: mod_base = OTHER; note = 2'-deoxy-2'-fluoroguanosine-3'-phosphate
  modified_base 5: mod_base = OTHER; note = 2'-deoxy-2'-fluoroadenosine-3'-phosphate
  modified_base 6: mod_base = OTHER; note = 2'-deoxy-2'-fluoroadenosine-3'-phosphate
  modified_base 7: mod_base = OTHER; note = 2'-O-methyluridine-3'-phosphate
  modified_base 8: mod_base = OTHER; note = 2'-deoxy-2'-fluoroadenosine-3'-phosphate
  modified_base 9: mod_base = OTHER; note = 2'-O-methylcytidine-3'-phosphate
  modified_base 10: mod_base = OTHER; note = 2'-deoxy-2'-fluorouridine-3'-phosphate
  modified_base 11: mod_base = OTHER; note = 2'-O-methylcytidine-3'-phosphate
  modified_base 12: mod_base = OTHER; note = 2'-O-methyluridine-3'-phosphate
  modified_base 13: mod_base = OTHER; note = 2'-O-methyluridine-3'-phosphate
  modified_base 14: mod_base = OTHER; note = 2'-deoxy-2'-fluoroguanosine-3'-phosphate
  modified_base 15: mod_base = OTHER; note = 2'-O-methylguanosine-3'-phosphate
  modified_base 16: mod_base = OTHER; note = 2'-deoxy-2'-fluorouridine-3'-phosphorothioate
  modified_base 17: mod_base = OTHER; note = 2'-O-methyluridine-3'-phosphate
  modified_base 18: mod_base = OTHER; note = 2'-deoxy-2'-fluoroadenosine-3'-phosphate
  modified_base 19: mod_base = OTHER; note = 2'-O-methylcytidine-3'-phosphate
  modified_base 20: mod_base = OTHER; note = 2'-deoxy-2'-fluoroadenosine-3'-phosphate
  modified_base 21: mod_base = OTHER; note = 2'-O-methyluridine-3'-phosphorothioate
  modified_base 22: mod_base = OTHER; note = 2'-deoxy-2'-fluoroguanosine-3'-phosphorothioate
  modified_base 23: mod_base = OTHER; note = 2'-O-methyladenosine
atggaatactcttggttacatga

SEQ ID NO: 458 - RNA, 23 nt, synthetic construct
  source 1..23: mol_type = other RNA
  modified_base 1: mod_base = OTHER; note = 2'-O-methyluridine-3'-phosphate
  modified_base 2: mod_base = OTHER; note = 2'-deoxy-2'-fluorocytidine-3'-phosphate
  modified_base 3: mod_base = OTHER; note = 2'-O-methyluridine-3'-phosphate
  modified_base 4: mod_base = OTHER; note = 2'-deoxy-2'-fluorouridine-3'-phosphate
  modified_base 5: mod_base = OTHER; note = 2'-O-methylguanosine-3'-phosphate
  modified_base 6: mod_base = OTHER; note = 2'-deoxy-2'-fluoroguanosine-3'-phosphate
  modified_base 7: mod_base = OTHER; note = 2'-deoxy-2'-fluorouridine-3'-phosphate
  modified_base 8: mod_base = OTHER; note = 2'-deoxy-2'-fluorouridine-3'-phosphate
  modified_base 9: mod_base = OTHER; note = 2'-O-methyladenosine-3'-phosphate
  modified_base 10: mod_base = OTHER; note = 2'-O-methylcytidine-3'-phosphate
  modified_base 11: mod_base = OTHER; note = 2'-O-methyladenosine-3'-phosphate
  modified_base 12: mod_base = OTHER; note = 2'-deoxy-2'-fluorouridine-3'-phosphate
  modified_base 13: mod_base = OTHER; note = 2'-O-methylguanosine-3'-phosphate
  modified_base 14: mod_base = OTHER; note = 2'-deoxy-2'-fluoroadenosine-3'-phosphate
  modified_base 15: mod_base = OTHER; note = 2'-O-methyladenosine-3'-phosphate
  modified_base 16: mod_base = OTHER; note = 2'-deoxy-2'-fluoroadenosine-3'-phosphate
  modified_base 17: mod_base = OTHER; note = 2'-O-methyluridine-3'-phosphate
  modified_base 18: mod_base = OTHER; note = 2'-deoxy-2'-fluorocytidine-3'-phosphate
  modified_base 19: mod_base = OTHER; note = 2'-O-methylcytidine-3'-phosphate
  modified_base 20: mod_base = OTHER; note = 2'-deoxy-2'-fluorocytidine-3'-phosphate
  modified_base 21: mod_base = OTHER; note = 2'-O-methyladenosine-3'-phosphorothioate
  modified_base 22: mod_base = OTHER; note = 2'-deoxy-2'-fluorouridine-3'-phosphorothioate
  modified_base 23: mod_base = OTHER; note = 2'-O-methylcytidine
tcttggttacatgaaatcccatc

SEQ ID NO: 459 - RNA, 23 nt, synthetic construct
  source 1..23: mol_type = other RNA
  modified_base 1: mod_base = OTHER; note = 2'-O-methyladenosine-3'-phosphate
  modified_base 2: mod_base = OTHER; note = 2'-deoxy-2'-fluorouridine-3'-phosphate
  modified_base 3: mod_base = OTHER; note = 2'-O-methylguanosine-3'-phosphate
  modified_base 4: mod_base = OTHER; note = 2'-deoxy-2'-fluoroguanosine-3'-phosphate
  modified_base 5: mod_base = OTHER; note = 2'-O-methyladenosine-3'-phosphate
  modified_base 6: mod_base = OTHER; note = 2'-deoxy-2'-fluoroadenosine-3'-phosphate
  modified_base 7: mod_base = OTHER; note = 2'-O-methyluridine-3'-phosphate
  modified_base 8: mod_base = OTHER; note = 2'-deoxy-2'-fluoroadenosine-3'-phosphate
  modified_base 9: mod_base = OTHER; note = 2'-O-methylcytidine-3'-phosphate
  modified_base 10: mod_base = OTHER; note = 2'-deoxy-2'-fluorouridine-3'-phosphate
  modified_base 11: mod_base = OTHER; note = 2'-O-methylcytidine-3'-phosphate
  modified_base 12: mod_base = OTHER; note = 2'-deoxy-2'-fluorouridine-3'-phosphate
  modified_base 13: mod_base = OTHER; note = 2'-O-methyluridine-3'-phosphate
  modified_base 14: mod_base = OTHER; note = 2'-deoxy-2'-fluoroguanosine-3'-phosphate
  modified_base 15: mod_base = OTHER; note = 2'-deoxy-2'-fluoroguanosine-3'-phosphate
  modified_base 16: mod_base = OTHER; note = 2'-O-methyluridine-3'-phosphate
  modified_base 17: mod_base = OTHER; note = 2'-O-methyluridine-3'-phosphate
  modified_base 18: mod_base = OTHER; note = 2'-deoxy-2'-fluoroadenosine-3'-phosphate
  modified_base 19: mod_base = OTHER; note = 2'-O-methylcytidine-3'-phosphate
  modified_base 20: mod_base = OTHER; note = 2'-deoxy-2'-fluoroadenosine-3'-phosphate
  modified_base 21: mod_base = OTHER; note = 2'-O-methyluridine-3'-phosphorothioate
  modified_base 22: mod_base = OTHER; note = 2'-deoxy-2'-fluoroguanosine-3'-phosphorothioate
  modified_base 23: mod_base = OTHER; note = 2'-O-methyladenosine
atggaatactcttggttacatga

SEQ ID NO: 460 - RNA, 23 nt, synthetic construct
  source 1..23: mol_type = other RNA
  modified_base 1: mod_base = OTHER; note = 2'-O-methyluridine-3'-phosphate
  modified_base 2: mod_base = OTHER; note = 2'-deoxy-2'-fluorocytidine-3'-phosphate
  modified_base 3: mod_base = OTHER; note = 2'-O-methyluridine-3'-phosphate
  modified_base 4: mod_base = OTHER; note = 2'-deoxy-2'-fluorouridine-3'-phosphate
  modified_base 5: mod_base = OTHER; note = 2'-O-methylguanosine-3'-phosphate
  modified_base 6: mod_base = OTHER; note = 2'-deoxy-2'-fluoroguanosine-3'-phosphate
  modified_base 7: mod_base = OTHER; note = 2'-O-methyluridine-3'-phosphate
  modified_base 8: mod_base = OTHER; note = 2'-deoxy-2'-fluorouridine-3'-phosphate
  modified_base 9: mod_base = OTHER; note = 2'-O-methyladenosine-3'-phosphate
  modified_base 10: mod_base = OTHER; note = 2'-deoxy-2'-fluorocytidine-3'-phosphate
  modified_base 11: mod_base = OTHER; note = 2'-O-methyladenosine-3'-phosphate
  modified_base 12: mod_base = OTHER; note = 2'-O-methyluridine-3'-phosphate
  modified_base 13: mod_base = OTHER; note = 2'-O-methylguanosine-3'-phosphate
  modified_base 14: mod_base = OTHER; note = 2'-deoxy-2'-fluoroadenosine-3'-phosphate
  modified_base 15: mod_base = OTHER; note = 2'-deoxy-2'-fluoroadenosine-3'-phosphate
  modified_base 16: mod_base = OTHER; note = 2'-deoxy-2'-fluoroadenosine-3'-phosphate
  modified_base 17: mod_base = OTHER; note = 2'-O-methyluridine-3'-phosphate
  modified_base 18: mod_base = OTHER; note = 2'-deoxy-2'-fluorocytidine-3'-phosphate
  modified_base 19: mod_base = OTHER; note = 2'-O-methylcytidine-3'-phosphate
  modified_base 20: mod_base = OTHER; note = 2'-deoxy-2'-fluorocytidine-3'-phosphate
  modified_base 21: mod_base = OTHER; note = 2'-O-methyladenosine-3'-phosphorothioate
  modified_base 22: mod_base = OTHER; note = 2'-deoxy-2'-fluorouridine-3'-phosphorothioate
  modified_base 23: mod_base = OTHER; note = 2'-O-methylcytidine
tcttggttacatgaaatcccatc

SEQ ID NO: 461 - RNA, 23 nt, synthetic construct
  source 1..23: mol_type = other RNA
  modified_base 1: mod_base = OTHER; note = 2'-O-methyluridine-3'-phosphate
  modified_base 2: mod_base = OTHER; note = 2'-deoxy-2'-fluorocytidine-3'-phosphate
  modified_base 3: mod_base = OTHER; note = 2'-O-methyluridine-3'-phosphate
  modified_base 4: mod_base = OTHER; note = 2'-O-methyluridine-3'-phosphate
  modified_base 5: mod_base = OTHER; note = 2'-O-methylguanosine-3'-phosphate
  modified_base 6: mod_base = OTHER; note = 2'-deoxy-2'-fluoroguanosine-3'-phosphate
  modified_base 7: mod_base = OTHER; note = 2'-O-methyluridine-3'-phosphate
  modified_base 8: mod_base = OTHER; note = 2'-deoxy-2'-fluorouridine-3'-phosphate
  modified_base 9: mod_base = OTHER; note = 2'-O-methyladenosine-3'-phosphate
  modified_base 10: mod_base = OTHER; note = 2'-deoxy-2'-fluorocytidine-3'-phosphate
  modified_base 11: mod_base = OTHER; note = 2'-O-methyladenosine-3'-phosphate
  modified_base 12: mod_base = OTHER; note = 2'-deoxy-2'-fluorouridine-3'-phosphate
  modified_base 13: mod_base = OTHER; note = 2'-O-methylguanosine-3'-phosphate
  modified_base 14: mod_base = OTHER; note = 2'-deoxy-2'-fluoroadenosine-3'-phosphate
  modified_base 15: mod_base = OTHER; note = 2'-O-methyladenosine-3'-phosphate
  modified_base 16: mod_base = OTHER; note = 2'-deoxy-2'-fluoroadenosine-3'-phosphate
  modified_base 17: mod_base = OTHER; note = 2'-O-methyluridine-3'-phosphate
  modified_base 18: mod_base = OTHER; note = 2'-O-methylcytidine-3'-phosphate
  modified_base 19: mod_base = OTHER; note = 2'-O-methylcytidine-3'-phosphate
  modified_base 20: mod_base = OTHER; note = 2'-deoxy-2'-fluorocytidine-3'-phosphate
  modified_base 21: mod_base = OTHER; note = 2'-O-methyladenosine-3'-phosphorothioate
  modified_base 22: mod_base = OTHER; note = 2'-deoxy-2'-fluorouridine-3'-phosphorothioate
  modified_base 23: mod_base = OTHER; note = 2'-O-methylcytidine
tcttggttacatgaaatcccatc

SEQ ID NO: 462 - RNA, 23 nt, synthetic construct
  source 1..23: mol_type = other RNA
  modified_base 1: mod_base = OTHER; note = 2'-O-methyluridine-3'-phosphate
  modified_base 2: mod_base = OTHER; note = 2'-deoxy-2'-fluorocytidine-3'-phosphate
  modified_base 3: mod_base = OTHER; note = 2'-O-methyluridine-3'-phosphate
  modified_base 4: mod_base = OTHER; note = 2'-deoxy-2'-fluorouridine-3'-phosphate
  modified_base 5: mod_base = OTHER; note = 2'-O-methylguanosine-3'-phosphate
  modified_base 6: mod_base = OTHER; note = 2'-deoxy-2'-fluoroguanosine-3'-phosphate
  modified_base 7: mod_base = OTHER; note = 2'-O-methyluridine-3'-phosphate
  modified_base 8: mod_base = OTHER; note = 2'-deoxy-2'-fluorouridine-3'-phosphate
  modified_base 9: mod_base = OTHER; note = 2'-O-methyladenosine-3'-phosphate
  modified_base 10: mod_base = OTHER; note = 2'-deoxy-2'-fluorocytidine-3'-phosphate
  modified_base 11: mod_base = OTHER; note = 2'-O-methyladenosine-3'-phosphate
  modified_base 12: mod_base = OTHER; note = 2'-O-methyluridine-3'-phosphate
  modified_base 13: mod_base = OTHER; note = 2'-O-methylguanosine-3'-phosphate
  modified_base 14: mod_base = OTHER; note = 2'-deoxy-2'-fluoroadenosine-3'-phosphate
  modified_base 15: mod_base = OTHER; note = 2'-O-methyladenosine-3'-phosphate
  modified_base 16: mod_base = OTHER; note = 2'-deoxy-2'-fluoroadenosine-3'-phosphate
  modified_base 17: mod_base = OTHER; note = 2'-O-methyluridine-3'-phosphate
  modified_base 18: mod_base = OTHER; note = 2'-O-methylcytidine-3'-phosphate
  modified_base 19: mod_base = OTHER; note = 2'-O-methylcytidine-3'-phosphate
  modified_base 20: mod_base = OTHER; note = 2'-deoxy-2'-fluorocytidine-3'-phosphate
  modified_base 21: mod_base = OTHER; note = 2'-O-methyladenosine-3'-phosphorothioate
  modified_base 22: mod_base = OTHER; note = 2'-deoxy-2'-fluorouridine-3'-phosphorothioate
  modified_base 23: mod_base = OTHER; note = 2'-O-methylcytidine
tcttggttacatgaaatcccatc

SEQ ID NO: 463 - RNA, 23 nt, synthetic construct
  source 1..23: mol_type = other RNA
  modified_base 1: mod_base = OTHER; note = 2'-O-methyluridine-3'-phosphate
  modified_base 2: mod_base = OTHER; note = 2'-deoxy-2'-fluorocytidine-3'-phosphate
  modified_base 3: mod_base = OTHER; note = 2'-deoxy-2'-fluorouridine-3'-phosphate
  modified_base 4: mod_base = OTHER; note = 2'-O-methyluridine-3'-phosphate
  modified_base 5: mod_base = OTHER; note = 2'-O-methylguanosine-3'-phosphate
  modified_base 6: mod_base = OTHER; note = 2'-deoxy-2'-fluoroguanosine-3'-phosphate
  modified_base 7: mod_base = OTHER; note = 2'-deoxy-2'-fluorouridine-3'-phosphate
  modified_base 8: mod_base = OTHER; note = 2'-O-methyluridine-3'-phosphate
  modified_base 9: mod_base = OTHER; note = 2'-O-methyladenosine-3'-phosphate
  modified_base 10: mod_base = OTHER; note = 2'-deoxy-2'-fluorocytidine-3'-phosphate
  modified_base 11: mod_base = OTHER; note = 2'-deoxy-2'-fluoroadenosine-3'-phosphate
  modified_base 12: mod_base = OTHER; note = 2'-O-methyluridine-3'-phosphate
  modified_base 13: mod_base = OTHER; note = 2'-O-methylguanosine-3'-phosphate
  modified_base 14: mod_base = OTHER; note = 2'-deoxy-2'-fluoroadenosine-3'-phosphate
  modified_base 15: mod_base = OTHER; note = 2'-deoxy-2'-fluoroadenosine-3'-phosphate
  modified_base 16: mod_base = OTHER; note = 2'-O-methyladenosine-3'-phosphate
  modified_base 17: mod_base = OTHER; note = 2'-O-methyluridine-3'-phosphate
  modified_base 18: mod_base = OTHER; note = 2'-deoxy-2'-fluorocytidine-3'-phosphate
  modified_base 19: mod_base = OTHER; note = 2'-deoxy-2'-fluorocytidine-3'-phosphate
  modified_base 20: mod_base = OTHER; note = 2'-O-methylcytidine-3'-phosphate
  modified_base 21: mod_base = OTHER; note = 2'-O-methyladenosine-3'-phosphorothioate
  modified_base 22: mod_base = OTHER; note = 2'-deoxy-2'-fluorouridine-3'-phosphorothioate
  modified_base 23: mod_base = OTHER; note = 2'-O-methylcytidine
tcttggttacatgaaatcccatc

SEQ ID NO: 464 - RNA, 23 nt, synthetic construct
  source 1..23: mol_type = other RNA
  modified_base 1: mod_base = OTHER; note = 2'-O-methyladenosine-3'-phosphate
  modified_base 2: mod_base = OTHER; note = 2'-deoxy-2'-fluorouridine-3'-phosphate
  modified_base 3: mod_base = OTHER; note = 2'-O-methylguanosine-3'-phosphate
  modified_base 4: mod_base = OTHER; note = 2'-deoxy-2'-fluoroguanosine-3'-phosphate
  modified_base 5: mod_base = OTHER; note = 2'-deoxy-2'-fluoroadenosine-3'-phosphate
  modified_base 6: mod_base = OTHER; note = 2'-deoxy-2'-fluoroadenosine-3'-phosphate
  modified_base 7: mod_base = OTHER; note = 2'-O-methyluridine-3'-phosphate
  modified_base 8: mod_base = OTHER; note = 2'-deoxy-2'-fluoroadenosine-3'-phosphate
  modified_base 9: mod_base = OTHER; note = 2'-O-methylcytidine-3'-phosphate
  modified_base 10: mod_base = OTHER; note = 2'-deoxy-2'-fluorouridine-3'-phosphate
  modified_base 11: mod_base = OTHER; note = 2'-O-methylcytidine-3'-phosphate
  modified_base 12: mod_base = OTHER; note = 2'-O-methyluridine-3'-phosphate
  modified_base 13: mod_base = OTHER; note = 2'-O-methyluridine-3'-phosphate
  modified_base 14: mod_base = OTHER; note = 2'-deoxy-2'-fluoroguanosine-3'-phosphate
  modified_base 15: mod_base = OTHER; note = 2'-O-methylguanosine-3'-phosphate
  modified_base 16: mod_base = OTHER; note = 2'-deoxy-2'-fluorouridine-3'-phosphate
  modified_base 17: mod_base = OTHER; note = 2'-O-methyluridine-3'-phosphate
  modified_base 18: mod_base = OTHER; note = 2'-deoxy-2'-fluoroadenosine-3'-phosphate
  modified_base 19: mod_base = OTHER; note = 2'-O-methylcytidine-3'-phosphate
  modified_base 20: mod_base = OTHER; note = 2'-deoxy-2'-fluoroadenosine-3'-phosphate
  modified_base 21: mod_base = OTHER; note = 2'-O-methyluridine-3'-phosphorothioate
  modified_base 22: mod_base = OTHER; note = 2'-deoxy-2'-fluoroguanosine-3'-phosphorothioate
  modified_base 23: mod_base = OTHER; note = 2'-O-methyladenosine
atggaatactcttggttacatga

SEQ ID NO: 465 - RNA, 23 nt, synthetic construct
  source 1..23: mol_type = other RNA
  modified_base 1: mod_base = OTHER; note = 2'-O-methyladenosine-3'-phosphate
  modified_base 2: mod_base = OTHER; note = 2'-deoxy-2'-fluorouridine-3'-phosphate
  modified_base 3: mod_base = OTHER; note = 2'-deoxy-2'-fluoroguanosine-3'-phosphate
  modified_base 4: mod_base = OTHER; note = 2'-deoxy-2'-fluoroguanosine-3'-phosphate
  modified_base 5: mod_base = OTHER; note = 2'-O-methyladenosine-3'-phosphate
  modified_base 6: mod_base = OTHER; note = 2'-deoxy-2'-fluoroadenosine-3'-phosphate
  modified_base 7: mod_base = OTHER; note = 2'-O-methyluridine-3'-phosphate
  modified_base 8: mod_base = OTHER; note = 2'-deoxy-2'-fluoroadenosine-3'-phosphate
  modified_base 9: mod_base = OTHER; note = 2'-O-methylcytidine-3'-phosphate
  modified_base 10: mod_base = OTHER; note = 2'-deoxy-2'-fluorouridine-3'-phosphate
  modified_base 11: mod_base = OTHER; note = 2'-O-methylcytidine-3'-phosphate
  modified_base 12: mod_base = OTHER; note = 2'-O-methyluridine-3'-phosphate
  modified_base 13: mod_base = OTHER; note = 2'-O-methyluridine-3'-phosphate
  modified_base 14: mod_base = OTHER; note = 2'-deoxy-2'-fluoroguanosine-3'-phosphate
  modified_base 15: mod_base = OTHER; note = 2'-O-methylguanosine-3'-phosphate
  modified_base 16: mod_base = OTHER; note = 2'-deoxy-2'-fluorouridine-3'-phosphate
  modified_base 17: mod_base = OTHER; note = 2'-O-methyluridine-3'-phosphate
  modified_base 18: mod_base = OTHER; note = 2'-deoxy-2'-fluoroadenosine-3'-phosphate
  modified_base 19: mod_base = OTHER; note = 2'-O-methylcytidine-3'-phosphate
  modified_base 20: mod_base = OTHER; note = 2'-deoxy-2'-fluoroadenosine-3'-phosphate
  modified_base 21: mod_base = OTHER; note = 2'-O-methyluridine-3'-phosphorothioate
  modified_base 22: mod_base = OTHER; note = 2'-deoxy-2'-fluoroguanosine-3'-phosphorothioate
  modified_base 23: mod_base = OTHER; note = 2'-O-methyladenosine
atggaatactcttggttacatga

SEQ ID NO: 466 - RNA, 23 nt, synthetic construct
  source 1..23: mol_type = other RNA
  modified_base 1: mod_base = OTHER; note = 2'-O-methyladenosine-3'-phosphorothioate
  modified_base 2: mod_base = OTHER; note = 2'-deoxy-2'-fluorouridine-3'-phosphate
  modified_base 3: mod_base = OTHER; note = 2'-O-methylguanosine-3'-phosphate
  modified_base 4: mod_base = OTHER; note = 2'-deoxy-2'-fluoroguanosine-3'-phosphate
  modified_base 5: mod_base = OTHER; note = 2'-deoxy-2'-fluoroadenosine-3'-phosphate
  modified_base 6: mod_base = OTHER; note = 2'-deoxy-2'-fluoroadenosine-3'-phosphate
  modified_base 7: mod_base = OTHER; note = 2'-O-methyluridine-3'-phosphate
  modified_base 8: mod_base = OTHER; note = 2'-deoxy-2'-fluoroadenosine-3'-phosphate
  modified_base 9: mod_base = OTHER; note = 2'-O-methylcytidine-3'-phosphate
  modified_base 10: mod_base = OTHER; note = 2'-deoxy-2'-fluorouridine-3'-phosphate
  modified_base 11: mod_base = OTHER; note = 2'-O-methylcytidine-3'-phosphate
  modified_base 12: mod_base = OTHER; note = 2'-O-methyluridine-3'-phosphate
  modified_base 13: mod_base = OTHER; note = 2'-O-methyluridine-3'-phosphate
  modified_base 14: mod_base = OTHER; note = 2'-deoxy-2'-fluoroguanosine-3'-phosphate
  modified_base 15: mod_base = OTHER; note = 2'-O-methylguanosine-3'-phosphate
  modified_base 16: mod_base = OTHER; note = 2'-deoxy-2'-fluorouridine-3'-phosphate
  modified_base 17: mod_base = OTHER; note = 2'-O-methyluridine-3'-phosphate
  modified_base 18: mod_base = OTHER; note = 2'-deoxy-2'-fluoroadenosine-3'-phosphate
  modified_base 19: mod_base = OTHER; note = 2'-O-methylcytidine-3'-phosphate
  modified_base 20: mod_base = OTHER; note = 2'-deoxy-2'-fluoroadenosine-3'-phosphate
  modified_base 21: mod_base = OTHER; note = 2'-O-methyluridine-3'-phosphorothioate
  modified_base 22: mod_base = OTHER; note = 2'-deoxy-2'-fluoroguanosine-3'-phosphorothioate
  modified_base 23: mod_base = OTHER; note = 2'-O-methyladenosine
atggaatactcttggttacatga

SEQ ID NO: 467 - RNA, 23 nt, synthetic construct
  source 1..23: mol_type = other RNA
  modified_base 1: mod_base = OTHER; note = 2'-O-methyluridine-3'-phosphate
  modified_base 2: mod_base = OTHER; note = 2'-deoxy-2'-fluorocytidine-3'-phosphate
  modified_base 3: mod_base = OTHER; note = 2'-O-methyluridine-3'-phosphate
  modified_base 4: mod_base = OTHER; note = 2'-deoxy-2'-fluorouridine-3'-phosphate
  modified_base 5: mod_base = OTHER; note = 2'-O-methylguanosine-3'-phosphate
  modified_base 6: mod_base = OTHER; note = 2'-deoxy-2'-fluoroguanosine-3'-phosphate
  modified_base 7: mod_base = OTHER; note = 2'-O-methyluridine-3'-phosphate
  modified_base 8: mod_base = OTHER; note = 2'-O-methyluridine-3'-phosphate
  modified_base 9: mod_base = OTHER; note = 2'-O-methyladenosine-3'-phosphate
  modified_base 10: mod_base = OTHER; note = 2'-deoxy-2'-fluorocytidine-3'-phosphate
  modified_base 11: mod_base = OTHER; note = 2'-O-methyladenosine-3'-phosphate
  modified_base 12: mod_base = OTHER; note = 2'-O-methyluridine-3'-phosphate
  modified_base 13: mod_base = OTHER; note = 2'-O-methylguanosine-3'-phosphate
  modified_base 14: mod_base = OTHER; note = 2'-deoxy-2'-fluoroadenosine-3'-phosphate
  modified_base 15: mod_base = OTHER; note = 2'-deoxy-2'-fluoroadenosine-3'-phosphate
  modified_base 16: mod_base = OTHER; note = 2'-deoxy-2'-fluoroadenosine-3'-phosphate
  modified_base 17: mod_base = OTHER; note = 2'-O-methyluridine-3'-phosphate
  modified_base 18: mod_base = OTHER; note = 2'-deoxy-2'-fluorocytidine-3'-phosphate
  modified_base 19: mod_base = OTHER; note = 2'-O-methylcytidine-3'-phosphate
  modified_base 20: mod_base = OTHER; note = 2'-deoxy-2'-fluorocytidine-3'-phosphate
  modified_base 21: mod_base = OTHER; note = 2'-O-methyladenosine-3'-phosphorothioate
  modified_base 22: mod_base = OTHER; note = 2'-deoxy-2'-fluorouridine-3'-phosphorothioate
  modified_base 23: mod_base = OTHER; note = 2'-O-methylcytidine
tcttggttacatgaaatcccatc

SEQ ID NO: 468 - RNA, 23 nt, synthetic construct
  source 1..23: mol_type = other RNA
  modified_base 1: mod_base = OTHER; note = 2'-O-methyladenosine-3'-phosphate
  modified_base 2: mod_base = OTHER; note = 2'-deoxy-2'-fluorouridine-3'-phosphate
  modified_base 3: mod_base = OTHER; note = 2'-O-methylguanosine-3'-phosphate
  modified_base 4: mod_base = OTHER; note = 2'-deoxy-2'-fluoroguanosine-3'-phosphate
  modified_base 5: mod_base = OTHER; note = 2'-O-methyladenosine-3'-phosphate
  modified_base 6: mod_base = OTHER; note = 2'-deoxy-2'-fluoroadenosine-3'-phosphate
  modified_base 7: mod_base = OTHER; note = 2'-deoxy-2'-fluorouridine-3'-phosphate
  modified_base 8: mod_base = OTHER; note = 2'-deoxy-2'-fluoroadenosine-3'-phosphate
  modified_base 9: mod_base = OTHER; note = 2'-O-methylcytidine-3'-phosphate
  modified_base 10: mod_base = OTHER; note = 2'-deoxy-2'-fluorouridine-3'-phosphate
  modified_base 11: mod_base = OTHER; note = 2'-O-methylcytidine-3'-phosphate
  modified_base 12: mod_base = OTHER; note = 2'-O-methyluridine-3'-phosphate
  modified_base 13: mod_base = OTHER; note = 2'-O-methyluridine-3'-phosphate
  modified_base 14: mod_base = OTHER; note = 2'-deoxy-2'-fluoroguanosine-3'-phosphate
  modified_base 15: mod_base = OTHER; note = 2'-O-methylguanosine-3'-phosphate
  modified_base 16: mod_base = OTHER; note = 2'-deoxy-2'-fluorouridine-3'-phosphate
  modified_base 17: mod_base = OTHER; note = 2'-O-methyluridine-3'-phosphate
  modified_base 18: mod_base = OTHER; note = 2'-deoxy-2'-fluoroadenosine-3'-phosphate
  modified_base 19: mod_base = OTHER; note = 2'-O-methylcytidine-3'-phosphate
  modified_base 20: mod_base = OTHER; note = 2'-deoxy-2'-fluoroadenosine-3'-phosphate
  modified_base 21: mod_base = OTHER; note = 2'-O-methyluridine-3'-phosphorothioate
  modified_base 22: mod_base = OTHER; note = 2'-deoxy-2'-fluoroguanosine-3'-phosphorothioate
  modified_base 23: mod_base = OTHER; note = 2'-O-methyladenosine
atggaatactcttggttacatga

SEQ ID NO: 469 - RNA, 23 nt, synthetic construct
  source 1..23: mol_type = other RNA
  modified_base 1: mod_base = OTHER; note = 2'-O-methyladenosine-3'-phosphorothioate
  modified_base 2: mod_base = OTHER; note = 2'-deoxy-2'-fluorouridine-3'-phosphate
  modified_base 3: mod_base = OTHER; note = 2'-O-methylguanosine-3'-phosphate
  modified_base 4: mod_base = OTHER; note = 2'-deoxy-2'-fluoroguanosine-3'-phosphate
  modified_base 5: mod_base = OTHER; note = 2'-deoxy-2'-fluoroadenosine-3'-phosphate
  modified_base 6: mod_base = OTHER; note = 2'-deoxy-2'-fluoroadenosine-3'-phosphate
  modified_base 7: mod_base = OTHER; note = 2'-O-methyluridine-3'-phosphate
  modified_base 8: mod_base = OTHER; note = 2'-deoxy-2'-fluoroadenosine-3'-phosphate
  modified_base 9: mod_base = OTHER; note = 2'-O-methylcytidine-3'-phosphate
  modified_base 10: mod_base = OTHER; note = 2'-deoxy-2'-fluorouridine-3'-phosphate
  modified_base 11: mod_base = OTHER; note = 2'-O-methylcytidine-3'-phosphate
  modified_base 12: mod_base = OTHER; note = 2'-O-methyluridine-3'-phosphate
  modified_base 13: mod_base = OTHER; note = 2'-O-methyluridine-3'-phosphate
  modified_base 14: mod_base = OTHER; note = 2'-deoxy-2'-fluoroguanosine-3'-phosphate
  modified_base 15: mod_base = OTHER; note = 2'-O-methylguanosine-3'-phosphorothioate
  modified_base 16: mod_base = OTHER; note = 2'-deoxy-2'-fluorouridine-3'-phosphorothioate
  modified_base 17: mod_base = OTHER; note = 2'-O-methyluridine-3'-phosphate
  modified_base 18: mod_base = OTHER; note = 2'-deoxy-2'-fluoroadenosine-3'-phosphate
  modified_base 19: mod_base = OTHER; note = 2'-O-methylcytidine-3'-phosphate
  modified_base 20: mod_base = OTHER; note = 2'-deoxy-2'-fluoroadenosine-3'-phosphate
  modified_base 21: mod_base = OTHER; note = 2'-O-methyluridine-3'-phosphorothioate
  modified_base 22: mod_base = OTHER; note = 2'-deoxy-2'-fluoroguanosine-3'-phosphorothioate
  modified_base 23: mod_base = OTHER; note = 2'-O-methyladenosine
atggaatactcttggttacatga

SEQ ID NO: 470 - RNA, 23 nt, synthetic construct
  source 1..23: mol_type = other RNA
  modified_base 1: mod_base = OTHER; note = 2'-O-methyladenosine-3'-phosphate
  modified_base 2: mod_base = OTHER; note = 2'-deoxy-2'-fluorouridine-3'-phosphate
  modified_base 3: mod_base = OTHER; note = 2'-deoxy-2'-fluoroguanosine-3'-phosphate
  modified_base 4: mod_base = OTHER; note = 2'-O-methylguanosine-3'-phosphate
  modified_base 5: mod_base = OTHER; note = 2'-O-methyladenosine-3'-phosphate
  modified_base 6: mod_base = OTHER; note = 2'-deoxy-2'-fluoroadenosine-3'-phosphate
  modified_base 7: mod_base = OTHER; note = 2'-deoxy-2'-fluorouridine-3'-phosphate
  modified_base 8: mod_base = OTHER; note = 2'-O-methyladenosine-3'-phosphate
  modified_base 9: mod_base = OTHER; note = 2'-O-methylcytidine-3'-phosphate
  modified_base 10: mod_base = OTHER; note = 2'-deoxy-2'-fluorouridine-3'-phosphate
  modified_base 11: mod_base = OTHER; note = 2'-deoxy-2'-fluorocytidine-3'-phosphate
  modified_base 12: mod_base = OTHER; note = 2'-O-methyluridine-3'-phosphate
  modified_base 13: mod_base = OTHER; note = 2'-O-methyluridine-3'-phosphate
  modified_base 14: mod_base = OTHER; note = 2'-deoxy-2'-fluoroguanosine-3'-phosphate
  modified_base 15: mod_base = OTHER; note = 2'-deoxy-2'-fluoroguanosine-3'-phosphate
  modified_base 16: mod_base = OTHER; note = 2'-O-methyluridine-3'-phosphate
  modified_base 17: mod_base = OTHER; note = 2'-O-methyluridine-3'-phosphate
  modified_base 18: mod_base = OTHER; note = 2'-deoxy-2'-fluoroadenosine-3'-phosphate
  modified_base 19: mod_base = OTHER; note = 2'-deoxy-2'-fluorocytidine-3'-phosphate
  modified_base 20: mod_base = OTHER; note = 2'-O-methyladenosine-3'-phosphate
  modified_base 21: mod_base = OTHER; note = 2'-deoxy-2'-fluorouridine-3'-phosphorothioate
  modified_base 22: mod_base = OTHER; note = 2'-O-methylguanosine-3'-phosphorothioate
  modified_base 23: mod_base = OTHER; note = 2'-O-methyladenosine
atggaatactcttggttacatga

SEQ ID NO: 471 - RNA, 23 nt, synthetic construct
  source 1..23: mol_type = other RNA
  modified_base 1: mod_base = OTHER; note = 2'-O-methyladenosine-3'-phosphate
  modified_base 2: mod_base = OTHER; note = 2'-deoxy-2'-fluorouridine-3'-phosphate
  modified_base 3: mod_base = OTHER; note = 2'-O-methylguanosine-3'-phosphate
  modified_base 4: mod_base = OTHER; note = 2'-deoxy-2'-fluoroguanosine-3'-phosphate
  modified_base 5: mod_base = OTHER; note = 2'-O-methyladenosine-3'-phosphate
  modified_base 6: mod_base = OTHER; note = 2'-deoxy-2'-fluoroadenosine-3'-phosphate
  modified_base 7: mod_base = OTHER; note = 2'-O-methyluridine-3'-phosphate
  modified_base 8: mod_base = OTHER; note = 2'-deoxy-2'-fluoroadenosine-3'-phosphate
  modified_base 9: mod_base = OTHER; note = 2'-deoxy-2'-fluorocytidine-3'-phosphate
  modified_base 10: mod_base = OTHER; note = 2'-deoxy-2'-fluorouridine-3'-phosphate
  modified_base 11: mod_base = OTHER; note = 2'-O-methylcytidine-3'-phosphate
  modified_base 12: mod_base = OTHER; note = 2'-O-methyluridine-3'-phosphate
  modified_base 13: mod_base = OTHER; note = 2'-O-methyluridine-3'-phosphate
  modified_base 14: mod_base = OTHER; note = 2'-deoxy-2'-fluoroguanosine-3'-phosphate
  modified_base 15: mod_base = OTHER; note = 2'-O-methylguanosine-3'-phosphate
  modified_base 16: mod_base = OTHER; note = 2'-deoxy-2'-fluorouridine-3'-phosphate
  modified_base 17: mod_base = OTHER; note = 2'-O-methyluridine-3'-phosphate
  modified_base 18: mod_base = OTHER; note = 2'-deoxy-2'-fluoroadenosine-3'-phosphate
  modified_base 19: mod_base = OTHER; note = 2'-O-methylcytidine-3'-phosphate
  modified_base 20: mod_base = OTHER; note = 2'-deoxy-2'-fluoroadenosine-3'-phosphate
  modified_base 21: mod_base = OTHER; note = 2'-O-methyluridine-3'-phosphorothioate
  modified_base 22: mod_base = OTHER; note = 2'-deoxy-2'-fluoroguanosine-3'-phosphorothioate
  modified_base 23: mod_base = OTHER; note = 2'-O-methyladenosine
atggaatactcttggttacatga

SEQ ID NO: 472 - RNA, 23 nt, synthetic construct
  source 1..23: mol_type = other RNA
  modified_base 1: mod_base = OTHER; note = 2'-O-methyluridine-3'-phosphate
  modified_base 2: mod_base = OTHER; note = 2'-deoxy-2'-fluorocytidine-3'-phosphate
  modified_base 3: mod_base = OTHER; note = 2'-O-methyluridine-3'-phosphate
  modified_base 4: mod_base = OTHER; note = 2'-deoxy-2'-fluorouridine-3'-phosphate
  modified_base 5: mod_base = OTHER; note = 2'-O-methylguanosine-3'-phosphate
  modified_base 6: mod_base = OTHER; note = 2'-deoxy-2'-fluoroguanosine-3'-phosphate
  modified_base 7: mod_base = OTHER; note = 2'-O-methyluridine-3'-phosphate
  modified_base 8: mod_base = OTHER; note = 2'-O-methyluridine-3'-phosphate
  modified_base 9: mod_base = OTHER; note = 2'-O-methyladenosine-3'-phosphate
  modified_base 10: mod_base = OTHER; note = 2'-deoxy-2'-fluorocytidine-3'-phosphate
  modified_base 11: mod_base = OTHER; note = 2'-O-methyladenosine-3'-phosphate
  modified_base 12: mod_base = OTHER; note = 2'-deoxy-2'-fluorouridine-3'-phosphate
  modified_base 13: mod_base = OTHER; note = 2'-O-methylguanosine-3'-phosphate
  modified_base 14: mod_base = OTHER; note = 2'-deoxy-2'-fluoroadenosine-3'-phosphate
  modified_base 15: mod_base = OTHER; note = 2'-O-methyladenosine-3'-phosphate
  modified_base 16: mod_base = OTHER; note = 2'-deoxy-2'-fluoroadenosine-3'-phosphate
  modified_base 17: mod_base = OTHER; note = 2'-O-methyluridine-3'-phosphate
  modified_base 18: mod_base = OTHER; note = 2'-O-methylcytidine-3'-phosphate
  modified_base 19: mod_base = OTHER; note = 2'-O-methylcytidine-3'-phosphate
  modified_base 20: mod_base = OTHER; note = 2'-deoxy-2'-fluorocytidine-3'-phosphate
  modified_base 21: mod_base = OTHER; note = 2'-O-methyladenosine-3'-phosphorothioate
  modified_base 22: mod_base = OTHER; note = 2'-deoxy-2'-fluorouridine-3'-phosphorothioate
  modified_base 23: mod_base = OTHER; note = 2'-O-methylcytidine
tcttggttacatgaaatcccatc

SEQ ID NO: 473 - RNA, 23 nt, synthetic construct
  source 1..23: mol_type = other RNA
  modified_base 1: mod_base = OTHER; note = 2'-O-methyladenosine-3'-phosphate
  modified_base 2: mod_base = OTHER; note = 2'-deoxy-2'-fluorouridine-3'-phosphate
  modified_base 3: mod_base = OTHER; note = 2'-O-methylguanosine-3'-phosphate
  modified_base 4: mod_base = OTHER; note = 2'-deoxy-2'-fluoroguanosine-3'-phosphate
  modified_base 5: mod_base = OTHER; note = 2'-O-methyladenosine-3'-phosphate
  modified_base 6: mod_base = OTHER; note = 2'-deoxy-2'-fluoroadenosine-3'-phosphate
  modified_base 7: mod_base = OTHER; note = 2'-O-methyluridine-3'-phosphate
  modified_base 8: mod_base = OTHER; note = 2'-deoxy-2'-fluoroadenosine-3'-phosphate
  modified_base 9: mod_base = OTHER; note = 2'-O-methylcytidine-3'-phosphate
  modified_base 10: mod_base = OTHER; note = 2'-deoxy-2'-fluorouridine-3'-phosphate
  modified_base 11: mod_base = OTHER; note = 2'-O-methylcytidine-3'-phosphate
  modified_base 12: mod_base = OTHER; note = 2'-O-methyluridine-3'-phosphate
  modified_base 13: mod_base = OTHER; note = 2'-O-methyluridine-3'-phosphate
  modified_base 14: mod_base = OTHER; note = 2'-deoxy-2'-fluoroguanosine-3'-phosphate
  modified_base 15: mod_base = OTHER; note = 2'-O-methylguanosine-3'-phosphate
  modified_base 16: mod_base = OTHER; note = 2'-deoxy-2'-fluorouridine-3'-phosphate
  modified_base 17: mod_base = OTHER; note = 2'-O-methyluridine-3'-phosphate
  modified_base 18: mod_base = OTHER; note = 2'-deoxy-2'-fluoroadenosine-3'-phosphate
  modified_base 19: mod_base = OTHER; note = 2'-O-methylcytidine-3'-phosphate
  modified_base 20: mod_base = OTHER; note = 2'-deoxy-2'-fluoroadenosine-3'-phosphate
  modified_base 21: mod_base = OTHER; note = 2'-O-methyluridine-3'-phosphorothioate
  modified_base 22: mod_base = OTHER; note = 2'-deoxy-2'-fluoroguanosine-3'-phosphorothioate
  modified_base 23: mod_base = OTHER; note = 2'-O-methyladenosine
atggaatactcttggttacatga

SEQ ID NO: 474 - RNA, 23 nt, synthetic construct
  source 1..23: mol_type = other RNA
  modified_base 1: mod_base = OTHER; note = 2'-deoxy-2'-fluoroadenosine-3'-phosphate
  modified_base 2: mod_base = OTHER; note = 2'-deoxy-2'-fluorouridine-3'-phosphate
  modified_base 3: mod_base = OTHER; note = 2'-deoxy-2'-fluoroguanosine-3'-phosphate
  modified_base 4: mod_base = OTHER; note = 2'-deoxy-2'-fluoroguanosine-3'-phosphate
  modified_base 5: mod_base = OTHER; note = 2'-deoxy-2'-fluoroadenosine-3'-phosphate
  modified_base 6: mod_base = OTHER; note = 2'-deoxy-2'-fluoroadenosine-3'-phosphate
  modified_base 7: mod_base = OTHER; note = 2'-O-methyluridine-3'-phosphate
  modified_base 8: mod_base = OTHER; note = 2'-deoxy-2'-fluoroadenosine-3'-phosphate
  modified_base 9: mod_base = OTHER; note = 2'-deoxy-2'-fluorocytidine-3'-phosphate
  modified_base 10: mod_base = OTHER; note = 2'-deoxy-2'-fluorouridine-3'-phosphate
  modified_base 11: mod_base = OTHER; note = 2'-deoxy-2'-fluorocytidine-3'-phosphate
  modified_base 12: mod_base = OTHER; note = 2'-deoxy-2'-fluorouridine-3'-phosphate
  modified_base 13: mod_base = OTHER; note = 2'-deoxy-2'-fluorouridine-3'-phosphate
  modified_base 14: mod_base = OTHER; note = 2'-deoxy-2'-fluoroguanosine-3'-phosphate
  modified_base 15: mod_base = OTHER; note = 2'-deoxy-2'-fluoroguanosine-3'-phosphate
  modified_base 16: mod_base = OTHER; note = 2'-deoxy-2'-fluorouridine-3'-phosphate
  modified_base 17: mod_base = OTHER; note = 2'-O-methyluridine-3'-phosphate
  modified_base 18: mod_base = OTHER; note = 2'-deoxy-2'-fluoroadenosine-3'-phosphate
  modified_base 19: mod_base = OTHER; note = 2'-deoxy-2'-fluorocytidine-3'-phosphate
  modified_base 20: mod_base = OTHER; note = 2'-deoxy-2'-fluoroadenosine-3'-phosphate
  modified_base 21: mod_base = OTHER; note = 2'-O-methyluridine-3'-phosphorothioate
  modified_base 22: mod_base = OTHER; note = 2'-deoxy-2'-fluoroguanosine-3'-phosphorothioate
  modified_base 23: mod_base = OTHER; note = 2'-O-methyladenosine
atggaatactcttggttacatga

SEQ ID NO: 475 - RNA, 23 nt, synthetic construct
  source 1..23: mol_type = other RNA
  modified_base 1: mod_base = OTHER; note = 2'-O-methyluridine-3'-phosphate
  modified_base 2: mod_base = OTHER; note = 2'-deoxy-2'-fluorocytidine-3'-phosphate
  modified_base 3: mod_base = OTHER; note = 2'-O-methyluridine-3'-phosphate
  modified_base 4: mod_base = OTHER; note = 2'-O-methyluridine-3'-phosphate
  modified_base 5: mod_base = OTHER; note = 2'-O-methylguanosine-3'-phosphate
  modified_base 6: mod_base = OTHER; note = 2'-deoxy-2'-fluoroguanosine-3'-phosphate
  modified_base 7: mod_base = OTHER; note = 2'-O-methyluridine-3'-phosphate
  modified_base 8: mod_base = OTHER; note = 2'-deoxy-2'-fluorouridine-3'-phosphate
  modified_base 9: mod_base = OTHER; note = 2'-O-methyladenosine-3'-phosphate
  modified_base 10: mod_base = OTHER; note = 2'-deoxy-2'-fluorocytidine-3'-phosphate
  modified_base 11: mod_base = OTHER; note = 2'-O-methyladenosine-3'-phosphate
  modified_base 12: mod_base = OTHER; note = 2'-deoxy-2'-fluorouridine-3'-phosphate
  modified_base 13: mod_base = OTHER; note = 2'-O-methylguanosine-3'-phosphate
  modified_base 14: mod_base = OTHER; note = 2'-deoxy-2'-fluoroadenosine-3'-phosphate
  modified_base 15: mod_base = OTHER; note = 2'-deoxy-2'-fluoroadenosine-3'-phosphate
  modified_base 16: mod_base = OTHER; note = 2'-deoxy-2'-fluoroadenosine-3'-phosphate
  modified_base 17: mod_base = OTHER; note = 2'-O-methyluridine-3'-phosphate
  modified_base 18: mod_base = OTHER; note = 2'-deoxy-2'-fluorocytidine-3'-phosphate
  modified_base 19: mod_base = OTHER; note = 2'-O-methylcytidine-3'-phosphate
  modified_base 20: mod_base = OTHER; note = 2'-deoxy-2'-fluorocytidine-3'-phosphate
  modified_base 21: mod_base = OTHER; note = 2'-O-methyladenosine-3'-phosphorothioate
  modified_base 22: mod_base = OTHER; note = 2'-deoxy-2'-fluorouridine-3'-phosphorothioate
  modified_base 23: mod_base = OTHER; note = 2'-O-methylcytidine
tcttggttacatgaaatcccatc

SEQ ID NO: 476 - DNA, 23 bp, synthetic construct
  source 1..23: mol_type = other DNA
  modified_base 1: mod_base = OTHER; note = 2'-O-methyladenosine-3'-phosphate
  modified_base 2: mod_base = OTHER; note = 2'-deoxy-2'-fluorouridine-3'-phosphate
  modified_base 3: mod_base = OTHER; note = 2'-O-methylguanosine-3'-phosphate
  modified_base 4: mod_base = OTHER; note = 2'-deoxy-2'-fluoroguanosine-3'-phosphate
  modified_base 5: mod_base = OTHER; note = 2'-O-methyladenosine-3'-phosphate
  modified_base 6: mod_base = OTHER; note = 2'-deoxy-2'-fluoroadenosine-3'-phosphate
  modified_base 7: mod_base = OTHER; note = 2'-O-methyluridine-3'-phosphate
  modified_base 9: mod_base = OTHER; note = 2'-O-methylcytidine-3'-phosphate
  modified_base 11: mod_base = OTHER; note = 2'-O-methylcytidine-3'-phosphate
  modified_base 13: mod_base = OTHER; note = 2'-O-methyluridine-3'-phosphate
  modified_base 15: mod_base = OTHER; note = 2'-O-methylguanosine-3'-phosphate
  modified_base 17: mod_base = OTHER; note = 2'-O-methyluridine-3'-phosphate
  modified_base 18: mod_base = OTHER; note = 2'-deoxy-2'-fluoroadenosine-3'-phosphate
  modified_base 19: mod_base = OTHER; note = 2'-O-methylcytidine-3'-phosphate
  modified_base 20: mod_base = OTHER; note = 2'-deoxy-2'-fluoroadenosine-3'-phosphate
  modified_base 21: mod_base = OTHER; note = 2'-O-methyluridine-3'-phosphorothioate
  modified_base 22: mod_base = OTHER; note = 2'-O-methylguanosine-3'-phosphorothioate
  modified_base 23: mod_base = OTHER; note = 2'-O-methyladenosine
  misc_feature 1..7: note = RNA
  misc_feature 9: note = RNA
  misc_feature 11: note = RNA
  misc_feature 13: note = RNA
  misc_feature 15: note = RNA
  misc_feature 17..23: note = RNA
  misc_feature 8: note = DNA
  misc_feature 10: note = DNA
  misc_feature 12: note = DNA
  misc_feature 14: note = DNA
  misc_feature 16: note = DNA
atggaatactcttggttacatga

SEQ ID NO: 477 - RNA, 23 nt, synthetic construct
  source 1..23: mol_type = other RNA
  modified_base 1: mod_base = OTHER; note = 2'-O-methyladenosine-3'-phosphate
  modified_base 2: mod_base = OTHER; note = 2'-deoxy-2'-fluorouridine-3'-phosphate
  modified_base 3: mod_base = OTHER; note = 2'-O-methylguanosine-3'-phosphate
  modified_base 4: mod_base = OTHER; note = 2'-deoxy-2'-fluoroguanosine-3'-phosphate
  modified_base 5: mod_base = OTHER; note = 2'-O-methyladenosine-3'-phosphate
  modified_base 6: mod_base = OTHER; note = 2'-deoxy-2'-fluoroadenosine-3'-phosphate
  modified_base 7: mod_base = OTHER; note = 2'-O-methyluridine-3'-phosphate
  modified_base 8: mod_base = OTHER; note = 2'-deoxy-2'-fluoroadenosine-3'-phosphate
  modified_base 9: mod_base = OTHER; note = 2'-O-methylcytidine-3'-phosphate
  modified_base 10: mod_base = OTHER; note = 2'-deoxy-2'-fluorouridine-3'-phosphate
  modified_base 11: mod_base = OTHER; note = 2'-O-methylcytidine-3'-phosphate
  modified_base 12: mod_base = OTHER; note = 2'-deoxy-2'-fluorouridine-3'-phosphate
  modified_base 13: mod_base = OTHER; note = 2'-O-methyluridine-3'-phosphate
  modified_base 14: mod_base = OTHER; note = 2'-deoxy-2'-fluoroguanosine-3'-phosphate
  modified_base 15: mod_base = OTHER; note = 2'-O-methylguanosine-3'-phosphate
  modified_base 16: mod_base = OTHER; note = 2'-deoxy-2'-fluorouridine-3'-phosphate
  modified_base 17: mod_base = OTHER; note = 2'-O-methyluridine-3'-phosphate
  modified_base 18: mod_base = OTHER; note = 2'-deoxy-2'-fluoroadenosine-3'-phosphate
  modified_base 19: mod_base = OTHER; note = 2'-O-methylcytidine-3'-phosphate
  modified_base 20: mod_base = OTHER; note = 2'-deoxy-2'-fluoroadenosine-3'-phosphate
  modified_base 21: mod_base = OTHER; note = 2'-O-methyluridine-3'-phosphorothioate
  modified_base 22: mod_base = OTHER; note = 2'-deoxy-2'-fluoroguanosine-3'-phosphorothioate
  modified_base 23: mod_base = OTHER; note = 2'-O-methyladenosine
atggaatactcttggttacatga

SEQ ID NO: 478 - DNA, 23 bp, synthetic construct
  source 1..23: mol_type = other DNA
  modified_base 2: mod_base = OTHER; note = uridine-3'-phosphate
  modified_base 4: mod_base = OTHER; note = guanosine-3'-phosphate
  modified_base 6: mod_base = OTHER; note = 2'-deoxy-2'-fluoroadenosine-3'-phosphate
  modified_base 7: mod_base = OTHER; note = 2'-O-methyluridine-3'-phosphate
  modified_base 8: mod_base = OTHER; note = 2'-deoxy-2'-fluoroadenosine-3'-phosphate
  modified_base 9: mod_base = OTHER; note = 2'-O-methylcytidine-3'-phosphate
  modified_base 10: mod_base = OTHER; note = 2'-deoxy-2'-fluorouridine-3'-phosphate
  modified_base 11: mod_base = OTHER; note = 2'-O-methylcytidine-3'-phosphate
  modified_base 12: mod_base = OTHER; note = 2'-deoxy-2'-fluorouridine-3'-phosphate
  modified_base 13: mod_base = OTHER; note = 2'-O-methyluridine-3'-phosphate
  modified_base 14: mod_base = OTHER; note = 2'-deoxy-2'-fluoroguanosine-3'-phosphate
  modified_base 15: mod_base = OTHER; note = 2'-deoxy-2'-fluoroguanosine-3'-phosphate
  modified_base 16: mod_base = OTHER; note = 2'-deoxy-2'-fluorouridine-3'-phosphate
  modified_base 17: mod_base = OTHER; note = 2'-O-methyluridine-3'-phosphate
  modified_base 18: mod_base = OTHER; note = 2'-deoxy-2'-fluoroadenosine-3'-phosphate
  modified_base 19: mod_base = OTHER; note = 2'-deoxy-2'-fluorocytidine-3'-phosphate
  modified_base 20: mod_base = OTHER; note = 2'-deoxy-2'-fluoroadenosine-3'-phosphate
  modified_base 21: mod_base = OTHER; note = 2'-O-methyluridine-3'-phosphorothioate
  modified_base 22: mod_base = OTHER; note = 2'-deoxy-2'-fluoroguanosine-3'-phosphorothioate
  modified_base 23: mod_base = OTHER; note = 2'-O-methyladenosine
  misc_feature 2: note = RNA
  misc_feature 4: note = RNA
  misc_feature 6..23: note = RNA
  misc_feature 1: note = DNA
  misc_feature 5: note = DNA
atggaatactcttggttacatga

SEQ ID NO: 479 - DNA, 23 bp, synthetic construct
  source 1..23: mol_type = other DNA
  modified_base 1: mod_base = OTHER; note = 2'-O-methyladenosine-3'-phosphate
  modified_base 4: mod_base = OTHER; note = 2'-deoxy-2'-fluoroguanosine-3'-phosphate
  modified_base 5: mod_base = OTHER; note = 2'-O-methyladenosine-3'-phosphate
  modified_base 6: mod_base = OTHER; note = 2'-deoxy-2'-fluoroadenosine-3'-phosphate
  modified_base 7: mod_base = OTHER; note = 2'-O-methyluridine-3'-phosphate
  modified_base 10: mod_base = OTHER; note = 2'-deoxy-2'-fluorouridine-3'-phosphate
  modified_base 11: mod_base = OTHER; note = 2'-O-methylcytidine-3'-phosphate
  modified_base 12: mod_base = OTHER; note = 2'-deoxy-2'-fluorouridine-3'-phosphate
  modified_base 13: mod_base = OTHER; note = 2'-O-methyluridine-3'-phosphate
  modified_base 14: mod_base = OTHER; note = 2'-deoxy-2'-fluoroguanosine-3'-phosphate
  modified_base 15: mod_base = OTHER; note = 2'-O-methylguanosine-3'-phosphate
  modified_base 16: mod_base = OTHER; note = 2'-deoxy-2'-fluorouridine-3'-phosphate
  modified_base 17: mod_base = OTHER; note = 2'-O-methyluridine-3'-phosphate
  modified_base 18: mod_base = OTHER; note = 2'-deoxy-2'-fluoroadenosine-3'-phosphate
  modified_base 19: mod_base = OTHER; note = 2'-O-methylcytidine-3'-phosphate
  modified_base 20: mod_base = OTHER; note = 2'-deoxy-2'-fluoroadenosine-3'-phosphate
  modified_base 21: mod_base = OTHER; note = 2'-O-methyluridine-3'-phosphorothioate
  modified_base 22: mod_base = OTHER; note = 2'-deoxy-2'-fluoroguanosine-3'-phosphorothioate
  modified_base 23: mod_base = OTHER; note = 2'-O-methyladenosine
  misc_feature 1: note = RNA
  misc_feature 4..7: note = RNA
  misc_feature 10..23: note = RNA
  misc_feature 2..3: note = DNA
  misc_feature 8..9: note = DNA
atggaatactcttggttacatga

SEQ ID NO: 480 - DNA, 23 bp, synthetic construct
  source 1..23: mol_type = other DNA
  modified_base 2: mod_base = OTHER; note = uridine-3'-phosphate
  modified_base 4: mod_base = OTHER; note = guanosine-3'-phosphate
  modified_base 6: mod_base = OTHER; note = 2'-O-methyladenosine-3'-phosphate
  modified_base 8: mod_base = OTHER; note = 2'-deoxy-2'-fluoroadenosine-3'-phosphate
  modified_base 9: mod_base = OTHER; note = 2'-O-methylcytidine-3'-phosphate
  modified_base 10: mod_base = OTHER; note = 2'-deoxy-2'-fluorouridine-3'-phosphate
  modified_base 11: mod_base = OTHER; note = 2'-O-methylcytidine-3'-phosphate
  modified_base 12: mod_base = OTHER; note = 2'-deoxy-2'-fluorouridine-3'-phosphate
  modified_base 13: mod_base = OTHER; note = 2'-O-methyluridine-3'-phosphate
  modified_base 14: mod_base = OTHER; note = 2'-deoxy-2'-fluoroguanosine-3'-phosphate
  modified_base 15: mod_base = OTHER; note = 2'-O-methylguanosine-3'-phosphate
  modified_base 16: mod_base = OTHER; note = 2'-deoxy-2'-fluorouridine-3'-phosphate
  modified_base 17: mod_base = OTHER; note = 2'-O-methyluridine-3'-phosphate
  modified_base 18: mod_base = OTHER; note = 2'-deoxy-2'-fluoroadenosine-3'-phosphate
  modified_base 19: mod_base = OTHER; note = 2'-O-methylcytidine-3'-phosphate
  modified_base 20: mod_base = OTHER; note = 2'-deoxy-2'-fluoroadenosine-3'-phosphate
  modified_base 21: mod_base = OTHER; note = 2'-O-methyluridine-3'-phosphorothioate
  modified_base 22: mod_base = OTHER; note = 2'-deoxy-2'-fluoroguanosine-3'-phosphorothioate
  modified_base 23: mod_base = OTHER; note = 2'-O-methyladenosine
  misc_feature 2: note = RNA
  misc_feature 4: note = RNA
  misc_feature 6: note = RNA
  misc_feature 8..23: note = RNA
  misc_feature 1: note = DNA
  misc_feature 5: note = DNA
  misc_feature 7: note = DNA
atggaatactcttggttacatga

SEQ ID NO: 481 - RNA, 23 nt, synthetic construct
  source 1..23: mol_type = other RNA
  modified_base 1: mod_base = OTHER; note = 2'-O-methyladenosine-3'-phosphate
  modified_base 3: mod_base = OTHER; note = 2'-O-methylguanosine-3'-phosphate
  modified_base 5: mod_base = OTHER; note = 2'-O-methyladenosine-3'-phosphate
  modified_base 7: mod_base = OTHER; note = 2'-O-methyluridine-3'-phosphate
  modified_base 9: mod_base = OTHER; note = 2'-O-methylcytidine-3'-phosphate
  modified_base 11: mod_base = OTHER; note = 2'-O-methylcytidine-3'-phosphate
  modified_base 13: mod_base = OTHER; note = 2'-O-methyluridine-3'-phosphate
  modified_base 15: mod_base = OTHER; note = 2'-O-methylguanosine-3'-phosphate
  modified_base 17: mod_base = OTHER; note = 2'-O-methyluridine-3'-phosphate
  modified_base 19: mod_base = OTHER; note = 2'-O-methylcytidine-3'-phosphate
  modified_base 21: mod_base = OTHER; note = 2'-O-methyluridine-3'-phosphorothioate
  modified_base 22: mod_base = OTHER; note = guanosine-3'-phosphorothioate
  modified_base 23: mod_base = OTHER; note = 2'-O-methyladenosine
atggaatactcttggttacatga

SEQ ID NO: 482 - RNA, 23 nt, synthetic construct
  source 1..23: mol_type = other RNA
  modified_base 1: mod_base = OTHER; note = 2'-O-methyladenosine-3'-phosphate
  modified_base 2: mod_base = OTHER; note = 2'-deoxy-2'-fluorouridine-3'-phosphate
  modified_base 3: mod_base = OTHER; note = 2'-deoxy-2'-fluoroguanosine-3'-phosphate
  modified_base 4: mod_base = OTHER; note = 2'-deoxy-2'-fluoroguanosine-3'-phosphate
  modified_base 5: mod_base = OTHER; note = 2'-O-methyladenosine-3'-phosphate
  modified_base 6: mod_base = OTHER; note = 2'-deoxy-2'-fluoroadenosine-3'-phosphate
  modified_base 7: mod_base = OTHER; note = 2'-deoxy-2'-fluorouridine-3'-phosphate
  modified_base 8: mod_base = OTHER; note = 2'-deoxy-2'-fluoroadenosine-3'-phosphate
  modified_base 9: mod_base = OTHER; note = 2'-O-methylcytidine-3'-phosphate
  modified_base 10: mod_base = OTHER; note = 2'-deoxy-2'-fluorouridine-3'-phosphate
  modified_base 11: mod_base = OTHER; note = 2'-deoxy-2'-fluorocytidine-3'-phosphate
  modified_base 12: mod_base = OTHER; note = 2'-deoxy-2'-fluorouridine-3'-phosphate
  modified_base 13: mod_base = OTHER; note = 2'-O-methyluridine-3'-phosphate
  modified_base 14: mod_base = OTHER; note = 2'-deoxy-2'-fluoroguanosine-3'-phosphate
  modified_base 15: mod_base = OTHER; note = 2'-deoxy-2'-fluoroguanosine-3'-phosphate
  modified_base 16: mod_base = OTHER; note = 2'-deoxy-2'-fluorouridine-3'-phosphate
  modified_base 17: mod_base = OTHER; note = 2'-O-methyluridine-3'-phosphate
  modified_base 18: mod_base = OTHER; note = 2'-deoxy-2'-fluoroadenosine-3'-phosphate
  modified_base 19: mod_base = OTHER; note = 2'-deoxy-2'-fluorocytidine-3'-phosphate
  modified_base 20: mod_base = OTHER; note = 2'-deoxy-2'-fluoroadenosine-3'-phosphate
  modified_base 21: mod_base = OTHER; note = 2'-O-methyluridine-3'-phosphorothioate
  modified_base 22: mod_base = OTHER; note = 2'-deoxy-2'-fluoroguanosine-3'-phosphorothioate
  modified_base 23: mod_base = OTHER; note = 2'-O-methyladenosine
atggaatactcttggttacatga

SEQ ID NO: 483 - DNA, 23 bp, synthetic construct
  source 1..23: mol_type = other DNA
  modified_base 1: mod_base = OTHER; note = 2'-O-methyladenosine-3'-phosphate
  modified_base 2: mod_base = OTHER; note = 2'-deoxy-2'-fluorouridine-3'-phosphate
  modified_base 3: mod_base = OTHER; note = 2'-O-methylguanosine-3'-phosphate
  modified_base 4: mod_base = OTHER; note = 2'-deoxy-2'-fluoroguanosine-3'-phosphate
  modified_base 5: mod_base = OTHER; note = 2'-O-methyladenosine-3'-phosphate
  modified_base 6: mod_base = OTHER; note = 2'-deoxy-2'-fluoroadenosine-3'-phosphate
  modified_base 7: mod_base = OTHER; note = 2'-O-methyluridine-3'-phosphate
  modified_base 9: mod_base = OTHER; note = 2'-O-methylcytidine-3'-phosphate
  modified_base 11: mod_base = OTHER; note = 2'-O-methylcytidine-3'-phosphate
  modified_base 13: mod_base = OTHER; note = 2'-O-methyluridine-3'-phosphate
  modified_base 15: mod_base = OTHER; note = 2'-O-methylguanosine-3'-phosphate
  modified_base 17: mod_base = OTHER; note = 2'-O-methyluridine-3'-phosphate
  modified_base 18: mod_base = OTHER; note = 2'-deoxy-2'-fluoroadenosine-3'-phosphate
  modified_base 19: mod_base = OTHER; note = 2'-O-methylcytidine-3'-phosphate
  modified_base 20: mod_base = OTHER; note = 2'-deoxy-2'-fluoroadenosine-3'-phosphate
  modified_base 21: mod_base = OTHER; note = 2'-O-methyluridine-3'-phosphorothioate
  modified_base 22: mod_base = OTHER; note = 2'-deoxy-2'-fluoroguanosine-3'-phosphorothioate
  modified_base 23: mod_base = OTHER; note = 2'-O-methyladenosine
  misc_feature 1..7: note = RNA
  misc_feature 9: note = RNA
  misc_feature 11: note = RNA
  misc_feature 13: note = RNA
  misc_feature 15: note = RNA
  misc_feature 17..23: note = RNA
  misc_feature 8: note = DNA
  misc_feature 10: note = DNA
  misc_feature 12: note = DNA
  misc_feature 14: note = DNA
  misc_feature 16: note = DNA
atggaatactcttggttacatga

SEQ ID NO: 484 - DNA, 23 bp, synthetic construct
  source 1..23: mol_type = other DNA
  modified_base 2: mod_base = OTHER; note = uridine-3'-phosphate
  modified_base 4: mod_base = OTHER; note = guanosine-3'-phosphate
  modified_base 6: mod_base = OTHER; note = 2'-O-methyladenosine-3'-phosphate
  modified_base 8: mod_base = OTHER; note = 2'-deoxy-2'-fluoroadenosine-3'-phosphate
  modified_base 10: mod_base = OTHER; note = 2'-deoxy-2'-fluorouridine-3'-phosphate
  modified_base 11: mod_base = OTHER; note = 2'-O-methylcytidine-3'-phosphate
  modified_base 12: mod_base = OTHER; note = 2'-deoxy-2'-fluorouridine-3'-phosphate
  modified_base 13: mod_base = OTHER; note = 2'-O-methyluridine-3'-phosphate
  modified_base 14: mod_base = OTHER; note = 2'-deoxy-2'-fluoroguanosine-3'-phosphate
  modified_base 15: mod_base = OTHER; note = 2'-O-methylguanosine-3'-phosphate
  modified_base 16: mod_base = OTHER; note = 2'-deoxy-2'-fluorouridine-3'-phosphate
  modified_base 17: mod_base = OTHER; note = 2'-O-methyluridine-3'-phosphate
  modified_base 18: mod_base = OTHER; note = 2'-deoxy-2'-fluoroadenosine-3'-phosphate
  modified_base 19: mod_base = OTHER; note = 2'-O-methylcytidine-3'-phosphate
  modified_base 20: mod_base = OTHER; note = 2'-deoxy-2'-fluoroadenosine-3'-phosphate
  modified_base 21: mod_base = OTHER; note = 2'-O-methyluridine-3'-phosphorothioate
  modified_base 22: mod_base = OTHER; note = 2'-deoxy-2'-fluoroguanosine-3'-phosphorothioate
  modified_base 23: mod_base = OTHER; note = 2'-O-methyladenosine
  misc_feature 2: note = RNA
  misc_feature 4: note = RNA
  misc_feature 6: note = RNA
  misc_feature 8: note = RNA
  misc_feature 10..23: note = RNA
  misc_feature 1: note = DNA
  misc_feature 5: note = DNA
  misc_feature 7: note = DNA
  misc_feature 9: note = DNA
atggaatactcttggttacatga

SEQ ID NO: 485 - DNA, 23 bp, synthetic construct
  source 1..23: mol_type = other DNA
  modified_base 1: mod_base = OTHER; note = 2'-O-methyladenosine-3'-phosphate
  modified_base 4: mod_base = OTHER; note = 2'-O-methylguanosine-3'-phosphate
  modified_base 6: mod_base = OTHER; note = 2'-O-methyladenosine-3'-phosphate
  modified_base 8: mod_base = OTHER; note = 2'-O-methyladenosine-3'-phosphate
  modified_base 12: mod_base = OTHER; note = 2'-O-methyluridine-3'-phosphate
  modified_base 13: mod_base = OTHER; note = 2'-O-methyluridine-3'-phosphate
  modified_base 16: mod_base = OTHER; note = 2'-O-methyluridine-3'-phosphate
  modified_base 17: mod_base = OTHER; note = 2'-O-methyluridine-3'-phosphate
  modified_base 20: mod_base = OTHER; note = 2'-O-methyladenosine-3'-phosphate
  modified_base 21: mod_base = OTHER; note = 2'-deoxythymidine-3'-phosphorothioate
  modified_base 22: mod_base = OTHER; note = 2'-O-methylguanosine-3'-phosphorothioate
  modified_base 23: mod_base = OTHER; note = 2'-O-methyladenosine
  misc_feature 1: note = RNA
  misc_feature 4: note = RNA
  misc_feature 6: note = RNA
  misc_feature 8: note = RNA
  misc_feature 12..13: note = RNA
  misc_feature 16..17: note = RNA
  misc_feature 20: note = RNA
  misc_feature 22..23: note = RNA
  misc_feature 2..3: note = DNA
  misc_feature 5: note = DNA
  misc_feature 7: note = DNA
  misc_feature 9..11: note = DNA
  misc_feature 14..15: note = DNA
  misc_feature 18..19: note = DNA
  misc_feature 21: note = DNA
atggaatactcttggttacatga

SEQ ID NO: 486 - DNA, 23 bp, synthetic construct
  source 1..23: mol_type = other DNA
  modified_base 1: mod_base = OTHER; note = 2'-O-methyladenosine-3'-phosphate
  modified_base 4: mod_base = OTHER; note = 2'-deoxy-2'-fluoroguanosine-3'-phosphate
  modified_base 5: mod_base = OTHER; note = 2'-O-methyladenosine-3'-phosphate
  modified_base 6: mod_base = OTHER; note = 2'-deoxy-2'-fluoroadenosine-3'-phosphate
  modified_base 7: mod_base = OTHER; note = 2'-O-methyluridine-3'-phosphate
  modified_base 8: mod_base = OTHER; note = 2'-deoxy-2'-fluoroadenosine-3'-phosphate
  modified_base 11: mod_base = OTHER; note = 2'-O-methylcytidine-3'-phosphate
  modified_base 12: mod_base = OTHER; note = 2'-deoxy-2'-fluorouridine-3'-phosphate
  modified_base 13: mod_base = OTHER; note = 2'-O-methyluridine-3'-phosphate
  modified_base 14: mod_base = OTHER; note = 2'-deoxy-2'-fluoroguanosine-3'-phosphate
  modified_base 15: mod_base = OTHER; note = 2'-O-methylguanosine-3'-phosphate
  modified_base 16: mod_base = OTHER; note = 2'-deoxy-2'-fluorouridine-3'-phosphate
  modified_base 17: mod_base = OTHER; note = 2'-O-methyluridine-3'-phosphate
  modified_base 18: mod_base = OTHER; note = 2'-deoxy-2'-fluoroadenosine-3'-phosphate
  modified_base 19: mod_base = OTHER; note = 2'-O-methylcytidine-3'-phosphate
  modified_base 20: mod_base = OTHER; note = 2'-deoxy-2'-fluoroadenosine-3'-phosphate
  modified_base 21: mod_base = OTHER; note = 2'-O-methyluridine-3'-phosphorothioate
  modified_base 22: mod_base = OTHER; note = 2'-deoxy-2'-fluoroguanosine-3'-phosphorothioate
  modified_base 23: mod_base = OTHER; note = 2'-O-methyladenosine
  misc_feature 1: note = RNA
  misc_feature 4..8: note = RNA
  misc_feature 11..23: note = RNA
  misc_feature 2..3: note = DNA
  misc_feature 9..10: note = DNA
atggaatactcttggttacatga

SEQ ID NO: 487 - RNA, 23 nt, synthetic construct
  source 1..23: mol_type = other RNA
  modified_base 1: mod_base = OTHER; note = 2'-O-methyladenosine-3'-phosphate
  modified_base 2: mod_base = OTHER; note = 2'-deoxy-2'-fluorouridine-3'-phosphate
  modified_base 3: mod_base = OTHER; note = 2'-O-methylguanosine-3'-phosphate
  modified_base 4: mod_base = OTHER; note = 2'-deoxy-2'-fluoroguanosine-3'-phosphate
  modified_base 5: mod_base = OTHER; note = 2'-O-methyladenosine-3'-phosphate
  modified_base 6: mod_base = OTHER; note = 2'-deoxy-2'-fluoroadenosine-3'-phosphate
  modified_base 7: mod_base = OTHER; note = 2'-O-methyluridine-3'-phosphate
  modified_base 8: mod_base = OTHER; note = 2'-deoxy-2'-fluoroadenosine-3'-phosphate
  modified_base 9: mod_base = OTHER; note = 2'-O-methylcytidine-3'-phosphate
  modified_base 10: mod_base = OTHER; note = 2'-deoxy-2'-fluorouridine-3'-phosphate
  modified_base 11: mod_base = OTHER; note = 2'-O-methylcytidine-3'-phosphate
  modified_base 12: mod_base = OTHER; note = 2'-deoxy-2'-fluorouridine-3'-phosphate
  modified_base 13: mod_base = OTHER; note = 2'-O-methyluridine-3'-phosphate
  modified_base 14: mod_base = OTHER; note = 2'-deoxy-2'-fluoroguanosine-3'-phosphate
  modified_base 15: mod_base = OTHER; note = 2'-O-methylguanosine-3'-phosphate
  modified_base 16: mod_base = OTHER; note = 2'-deoxy-2'-fluorouridine-3'-phosphate
  modified_base 17: mod_base = OTHER; note = 2'-O-methyluridine-3'-phosphate
  modified_base 18: mod_base = OTHER; note = 2'-deoxy-2'-fluoroadenosine-3'-phosphate
  modified_base 19: mod_base = OTHER; note = 2'-O-methylcytidine-3'-phosphate
  modified_base 20: mod_base = OTHER; note = 2'-deoxy-2'-fluoroadenosine-3'-phosphate
  modified_base 21: mod_base = OTHER; note = 2'-O-methyluridine-3'-phosphorothioate
  modified_base 22: mod_base = OTHER; note = 2'-deoxy-2'-fluoroguanosine-3'-phosphorothioate
  modified_base 23: mod_base = OTHER; note = 2'-O-methyladenosine
atggaatactcttggttacatga

SEQ ID NO: 488 - DNA, 23 bp, synthetic construct
  source 1..23: mol_type = other DNA
  modified_base 3: mod_base = OTHER; note = 2'-O-methylguanosine-3'-phosphate
  modified_base 4: mod_base = OTHER; note = 2'-O-methylguanosine-3'-phosphate
  modified_base 7: mod_base = OTHER; note = 2'-O-methyluridine-3'-phosphate
  modified_base 8: mod_base = OTHER; note = 2'-O-methyladenosine-3'-phosphate
  modified_base 11: mod_base = OTHER; note = 2'-O-methylcytidine-3'-phosphate
  modified_base 12: mod_base = OTHER; note = 2'-O-methyluridine-3'-phosphate
  modified_base 15: mod_base = OTHER; note = 2'-O-methylguanosine-3'-phosphate
  modified_base 16: mod_base = OTHER; note = 2'-O-methyluridine-3'-phosphate
  modified_base 19: mod_base = OTHER; note = 2'-O-methylcytidine-3'-phosphate
  modified_base 20: mod_base = OTHER; note = 2'-O-methyladenosine-3'-phosphate
  modified_base 21: mod_base = OTHER; note = 2'-deoxythymidine-3'-phosphorothioate
  modified_base 22: mod_base = OTHER; note = 2'-deoxyguanosine-3'-phosphorothioate
  modified_base 23: mod_base = OTHER; note = 2'-O-methyladenosine
  misc_feature 3..4: note = RNA
  misc_feature 7..8: note = RNA
  misc_feature 11..12: note = RNA
  misc_feature 15..16: note = RNA
  misc_feature 19..20: note = RNA
  misc_feature 23: note = RNA
  misc_feature 1..2: note = DNA
  misc_feature 5..6: note = DNA
  misc_feature 9..10: note = DNA
  misc_feature 13..14: note = DNA
  misc_feature 17..18: note = DNA
  misc_feature 21..22: note = DNA
atggaatactcttggttacatga

SEQ ID NO: 489 - DNA, 23 bp, synthetic construct
  source 1..23: mol_type = other DNA
  modified_base 1: mod_base = OTHER; note = 2'-O-methyladenosine-3'-phosphate
  modified_base 4: mod_base = OTHER; note = 2'-deoxy-2'-fluoroguanosine-3'-phosphate
  modified_base 5: mod_base = OTHER; note = 2'-O-methyladenosine-3'-phosphate
  modified_base 6: mod_base = OTHER; note = 2'-deoxy-2'-fluoroadenosine-3'-phosphate
  modified_base 9: mod_base = OTHER; note = 2'-O-methylcytidine-3'-phosphate
  modified_base 10: mod_base = OTHER; note = 2'-deoxy-2'-fluorouridine-3'-phosphate
  modified_base 11: mod_base = OTHER; note = 2'-O-methylcytidine-3'-phosphate
  modified_base 12: mod_base = OTHER; note = 2'-deoxy-2'-fluorouridine-3'-phosphate
  modified_base 13: mod_base = OTHER; note = 2'-O-methyluridine-3'-phosphate
  modified_base 14: mod_base = OTHER; note = 2'-deoxy-2'-fluoroguanosine-3'-phosphate
  modified_base 15: mod_base = OTHER; note = 2'-O-methylguanosine-3'-phosphate
  modified_base 16: mod_base = OTHER; note = 2'-deoxy-2'-fluorouridine-3'-phosphate
  modified_base 17: mod_base = OTHER; note = 2'-O-methyluridine-3'-phosphate
  modified_base 18: mod_base = OTHER; note = 2'-deoxy-2'-fluoroadenosine-3'-phosphate
  modified_base 19: mod_base = OTHER; note = 2'-O-methylcytidine-3'-phosphate
  modified_base 20: mod_base = OTHER; note = 2'-deoxy-2'-fluoroadenosine-3'-phosphate
  modified_base 21: mod_base = OTHER; note = 2'-O-methyluridine-3'-phosphorothioate
  modified_base 22: mod_base = OTHER; note = 2'-deoxy-2'-fluoroguanosine-3'-phosphorothioate
  modified_base 23: mod_base = OTHER; note = 2'-O-methyladenosine
  misc_feature 1: note = RNA
  misc_feature 4..6: note = RNA
  misc_feature 9..23: note = RNA
  misc_feature 2..3: note = DNA
  misc_feature 7..8: note = DNA
atggaatactcttggttacatga

SEQ ID NO: 490 - DNA, 23 bp, synthetic construct
  source 1..23: mol_type = other DNA
  modified_base 2: mod_base = OTHER; note = uridine-3'-phosphate
  modified_base 4: mod_base = OTHER; note = 2'-O-methylguanosine-3'-phosphate
  modified_base 6: mod_base = OTHER; note = 2'-O-methyladenosine-3'-phosphate
  modified_base 8: mod_base = OTHER; note = 2'-deoxy-2'-fluoroadenosine-3'-phosphate
  modified_base 9: mod_base = OTHER; note = 2'-O-methylcytidine-3'-phosphate
  modified_base 10: mod_base = OTHER; note = 2'-deoxy-2'-fluorouridine-3'-phosphate
  modified_base 11: mod_base = OTHER; note = 2'-O-methylcytidine-3'-phosphate
  modified_base 12: mod_base = OTHER; note = 2'-deoxy-2'-fluorouridine-3'-phosphate
  modified_base 13: mod_base = OTHER; note = 2'-O-methyluridine-3'-phosphate
  modified_base 14: mod_base = OTHER; note = 2'-deoxy-2'-fluoroguanosine-3'-phosphate
  modified_base 15: mod_base = OTHER; note = 2'-O-methylguanosine-3'-phosphate
  modified_base 16: mod_base = OTHER; note = 2'-deoxy-2'-fluorouridine-3'-phosphate
  modified_base 17: mod_base = OTHER; note = 2'-O-methyluridine-3'-phosphate
  modified_base 18: mod_base = OTHER; note = 2'-deoxy-2'-fluoroadenosine-3'-phosphate
  modified_base 19: mod_base = OTHER; note = 2'-O-methylcytidine-3'-phosphate
  modified_base 20: mod_base = OTHER; note = 2'-deoxy-2'-fluoroadenosine-3'-phosphate
  modified_base 21: mod_base = OTHER; note = 2'-O-methyluridine-3'-phosphorothioate
  modified_base 22: mod_base = OTHER; note = 2'-deoxy-2'-fluoroguanosine-3'-phosphorothioate
  modified_base 23: mod_base = OTHER; note = 2'-O-methyladenosine
  misc_feature 2: note = RNA
  misc_feature 4: note = RNA
  misc_feature 6: note = RNA
  misc_feature 8..23: note = RNA
  misc_feature 1: note = DNA
  misc_feature 5: note = DNA
  misc_feature 7: note = DNA
atggaatactcttggttacatga

SEQ ID NO: 491 - DNA, 23 bp, synthetic construct
  source 1..23: mol_type = other DNA
  modified_base 1: mod_base = OTHER; note = 2'-O-methyladenosine-3'-phosphate
  modified_base 4: mod_base = OTHER; note = 2'-deoxy-2'-fluoroguanosine-3'-phosphate
  modified_base 5: mod_base = OTHER; note = 2'-O-methyladenosine-3'-phosphate
  modified_base 8: mod_base = OTHER; note = 2'-deoxy-2'-fluoroadenosine-3'-phosphate
  modified_base 9: mod_base = OTHER; note = 2'-O-methylcytidine-3'-phosphate
  modified_base 10: mod_base = OTHER; note = 2'-deoxy-2'-fluorouridine-3'-phosphate
  modified_base 11: mod_base = OTHER; note = 2'-O-methylcytidine-3'-phosphate
  modified_base 12: mod_base = OTHER; note = 2'-deoxy-2'-fluorouridine-3'-phosphate
  modified_base 13: mod_base = OTHER; note = 2'-O-methyluridine-3'-phosphate
  modified_base 14: mod_base = OTHER; note = 2'-deoxy-2'-fluoroguanosine-3'-phosphate
  modified_base 15: mod_base = OTHER; note = 2'-O-methylguanosine-3'-phosphate
  modified_base 16: mod_base = OTHER; note = 2'-deoxy-2'-fluorouridine-3'-phosphate
  modified_base 17: mod_base = OTHER; note = 2'-O-methyluridine-3'-phosphate
  modified_base 18: mod_base = OTHER; note = 2'-deoxy-2'-fluoroadenosine-3'-phosphate
  modified_base 19: mod_base = OTHER; note = 2'-O-methylcytidine-3'-phosphate
  modified_base 20: mod_base = OTHER; note = 2'-deoxy-2'-fluoroadenosine-3'-phosphate
  modified_base 21: mod_base = OTHER; note = 2'-O-methyluridine-3'-phosphorothioate
  modified_base 22: mod_base = OTHER; note = 2'-deoxy-2'-fluoroguanosine-3'-phosphorothioate
  modified_base 23: mod_base = OTHER; note = 2'-O-methyladenosine
  misc_feature 1: note = RNA
  misc_feature 4..5: note = RNA
  misc_feature 8..23: note = RNA
  misc_feature 2..3: note = DNA
  misc_feature 6..7: note = DNA
atggaatactcttggttacatga

SEQ ID NO: 492 - RNA, 23 nt, synthetic construct
  source 1..23: mol_type = other RNA
  modified_base 1: mod_base = OTHER; note = 2'-O-methyladenosine-3'-phosphate
  modified_base 2: mod_base = OTHER; note = 2'-deoxy-2'-fluorouridine-3'-phosphate
  modified_base 3: mod_base = OTHER; note = 2'-O-methylguanosine-3'-phosphate
  modified_base 4: mod_base = OTHER; note = 2'-deoxy-2'-fluoroguanosine-3'-phosphate
  modified_base 5: mod_base = OTHER; note = 2'-O-methyladenosine-3'-phosphate
  modified_base 6: mod_base = OTHER; note = 2'-deoxy-2'-fluoroadenosine-3'-phosphate
  modified_base 7: mod_base = OTHER; note = 2'-O-methyluridine-3'-phosphate
  modified_base 8: mod_base = OTHER; note = 2'-deoxy-2'-fluoroadenosine-3'-phosphate
  modified_base 9: mod_base = OTHER; note = 2'-O-methylcytidine-3'-phosphate
  modified_base 10: mod_base = OTHER; note = 2'-deoxy-2'-fluorouridine-3'-phosphate
  modified_base 11: mod_base = OTHER; note = 2'-O-methylcytidine-3'-phosphate
  modified_base 12: mod_base = OTHER; note = 2'-deoxy-2'-fluorouridine-3'-phosphate
  modified_base 13: mod_base = OTHER; note = 2'-O-methyluridine-3'-phosphate
  modified_base 14: mod_base = OTHER; note = 2'-deoxy-2'-fluoroguanosine-3'-phosphate
  modified_base 15: mod_base = OTHER; note = 2'-O-methylguanosine-3'-phosphate
  modified_base 16: mod_base = OTHER; note = 2'-deoxy-2'-fluorouridine-3'-phosphate
  modified_base 17: mod_base = OTHER; note = 2'-O-methyluridine-3'-phosphate
  modified_base 18: mod_base = OTHER; note = 2'-deoxy-2'-fluoroadenosine-3'-phosphate
  modified_base 19: mod_base = OTHER; note = 2'-O-methylcytidine-3'-phosphate
  modified_base 20: mod_base = OTHER; note = 2'-deoxy-2'-fluoroadenosine-3'-phosphate
  modified_base 21: mod_base = OTHER; note = 2'-O-methyluridine-3'-phosphorothioate
  modified_base 22: mod_base = OTHER; note = 2'-deoxy-2'-fluoroguanosine-3'-phosphorothioate
  modified_base 23: mod_base = OTHER; note = 2'-O-methyladenosine
atggaatactcttggttacatga

SEQ ID NO: 493 - DNA, 23 bp, synthetic construct
  source 1..23: mol_type = other DNA
  modified_base 2: mod_base = OTHER; note = uridine-3'-phosphate
  modified_base 4: mod_base = OTHER; note = guanosine-3'-phosphate
  modified_base 6: mod_base = OTHER; note = adenosine-3'-phosphate
  modified_base 7: mod_base = OTHER; note = 2'-O-methyluridine-3'-phosphate
  modified_base 8: mod_base = OTHER; note = 2'-deoxy-2'-fluoroadenosine-3'-phosphate
  modified_base 9: mod_base = OTHER; note = 2'-O-methylcytidine-3'-phosphate
  modified_base 10: mod_base = OTHER; note = 2'-deoxy-2'-fluorouridine-3'-phosphate
  modified_base 11: mod_base = OTHER; note = 2'-O-methylcytidine-3'-phosphate
  modified_base 12: mod_base = OTHER; note = 2'-deoxy-2'-fluorouridine-3'-phosphate
  modified_base 13: mod_base = OTHER; note = 2'-O-methyluridine-3'-phosphate
  modified_base 14: mod_base = OTHER; note = 2'-deoxy-2'-fluoroguanosine-3'-phosphate
  modified_base 15: mod_base = OTHER; note = 2'-deoxy-2'-fluoroguanosine-3'-phosphate
  modified_base 16: mod_base = OTHER; note = 2'-deoxy-2'-fluorouridine-3'-phosphate
  modified_base 17: mod_base = OTHER; note = 2'-O-methyluridine-3'-phosphate
  modified_base 18: mod_base = OTHER; note = 2'-deoxy-2'-fluoroadenosine-3'-phosphate
  modified_base 19: mod_base = OTHER; note = 2'-deoxy-2'-fluorocytidine-3'-phosphate
  modified_base 20: mod_base = OTHER; note = 2'-deoxy-2'-fluoroadenosine-3'-phosphate
  modified_base 21: mod_base = OTHER; note = 2'-O-methyluridine-3'-phosphorothioate
  modified_base 22: mod_base = OTHER; note = 2'-deoxy-2'-fluoroguanosine-3'-phosphorothioate
  modified_base 23: mod_base = OTHER; note = 2'-O-methyladenosine
  misc_feature 2: note = RNA
  misc_feature 4: note = RNA
  misc_feature 6..23: note = RNA
  misc_feature 1: note = DNA
  misc_feature 5: note = DNA
atggaatactcttggttacatga

SEQ ID NO: 494 - RNA, 23 nt, synthetic construct
  source 1..23: mol_type = other RNA
  modified_base 1: mod_base = OTHER; note = 2'-deoxy-2'-fluoroadenosine-3'-phosphate
  modified_base 2: mod_base = OTHER; note = 2'-deoxy-2'-fluorouridine-3'-phosphate
  modified_base 3: mod_base = OTHER; note = 2'-O-methylguanosine-3'-phosphate
  modified_base 4: mod_base = OTHER; note = 2'-O-methylguanosine-3'-phosphate
  modified_base 5: mod_base = OTHER; note = 2'-deoxy-2'-fluoroadenosine-3'-phosphate
  modified_base 6: mod_base = OTHER; note = 2'-deoxy-2'-fluoroadenosine-3'-phosphate
  modified_base 7: mod_base = OTHER; note = 2'-O-methyluridine-3'-phosphate
  modified_base 8: mod_base = OTHER; note = 2'-O-methyladenosine-3'-phosphate
  modified_base 9: mod_base = OTHER; note = 2'-deoxy-2'-fluorocytidine-3'-phosphate
  modified_base 10: mod_base = OTHER; note = 2'-deoxy-2'-fluorouridine-3'-phosphate
  modified_base 11: mod_base = OTHER; note = 2'-O-methylcytidine-3'-phosphate
  modified_base 12: mod_base = OTHER; note = 2'-O-methyluridine-3'-phosphate
  modified_base 13: mod_base = OTHER; note = 2'-deoxy-2'-fluorouridine-3'-phosphate
  modified_base 14: mod_base = OTHER; note = 2'-deoxy-2'-fluoroguanosine-3'-phosphate
  modified_base 15: mod_base = OTHER; note = 2'-O-methylguanosine-3'-phosphate
  modified_base 16: mod_base = OTHER; note = 2'-O-methyluridine-3'-phosphate
  modified_base 17: mod_base = OTHER; note = 2'-deoxy-2'-fluorouridine-3'-phosphate
  modified_base 18: mod_base = OTHER; note = 2'-deoxy-2'-fluoroadenosine-3'-phosphate
  modified_base 19: mod_base = OTHER; note = 2'-O-methylcytidine-3'-phosphate
  modified_base 20: mod_base = OTHER; note = 2'-O-methyladenosine-3'-phosphate
  modified_base 21: mod_base = OTHER; note = 2'-deoxy-2'-fluorouridine-3'-phosphorothioate
  modified_base 22: mod_base = OTHER; note = 2'-deoxy-2'-fluoroguanosine-3'-phosphorothioate
  modified_base 23: mod_base = OTHER; note = 2'-O-methyladenosine
atggaatactcttggttacatga

SEQ ID NO: 495 - RNA, 23 nt, synthetic construct
  source 1..23: mol_type = other RNA
  modified_base 1: mod_base = OTHER; note = 2'-O-methyladenosine-3'-phosphate
  modified_base 2: mod_base = OTHER; note = 2'-deoxy-2'-fluorouridine-3'-phosphate
  modified_base 3: mod_base = OTHER; note = 2'-O-methylguanosine-3'-phosphate
  modified_base 4: mod_base = OTHER; note = 2'-deoxy-2'-fluoroguanosine-3'-phosphate
  modified_base 5: mod_base = OTHER; note = 2'-O-methyladenosine-3'-phosphate
  modified_base 6: mod_base = OTHER; note = 2'-deoxy-2'-fluoroadenosine-3'-phosphate
  modified_base 7: mod_base = OTHER; note = 2'-O-methyluridine-3'-phosphate
  modified_base 8: mod_base = OTHER; note = 2'-deoxy-2'-fluoroadenosine-3'-phosphate
  modified_base 9: mod_base = OTHER; note = 2'-deoxy-2'-fluorocytidine-3'-phosphate
  modified_base 10: mod_base = OTHER; note = 2'-deoxy-2'-fluorouridine-3'-phosphate
  modified_base 11: mod_base = OTHER; note = 2'-O-methylcytidine-3'-phosphate
  modified_base 12: mod_base = OTHER; note = 2'-deoxy-2'-fluorouridine-3'-phosphate
  modified_base 13: mod_base = OTHER; note = 2'-O-methyluridine-3'-phosphate
  modified_base 14: mod_base = OTHER; note = 2'-O-methylguanosine-3'-phosphate
  modified_base 15: mod_base = OTHER; note = 2'-O-methylguanosine-3'-phosphate
  modified_base 16: mod_base = OTHER; note = 2'-deoxy-2'-fluorouridine-3'-phosphate
  modified_base 17: mod_base = OTHER; note = 2'-O-methyluridine-3'-phosphate
  modified_base 18: mod_base = OTHER; note = 2'-deoxy-2'-fluoroadenosine-3'-phosphate
  modified_base 19: mod_base = OTHER; note = 2'-O-methylcytidine-3'-phosphate
  modified_base 20: mod_base = OTHER; note = 2'-deoxy-2'-fluoroadenosine-3'-phosphate
  modified_base 21: mod_base = OTHER; note = 2'-O-methyluridine-3'-phosphorothioate
  modified_base 22: mod_base = OTHER; note = 2'-deoxy-2'-fluoroguanosine-3'-phosphorothioate
  modified_base 23: mod_base = OTHER; note = 2'-O-methyladenosine
atggaatactcttggttacatga

SEQ ID NO: 496 - RNA, 23 nt, synthetic construct
  source 1..23: mol_type = other RNA
  modified_base 1: mod_base = OTHER; note = 2'-O-methyluridine-3'-phosphate
  modified_base 2: mod_base = OTHER; note = 2'-deoxy-2'-fluorocytidine-3'-phosphate
  modified_base 3: mod_base = OTHER; note = 2'-O-methyluridine-3'-phosphate
  modified_base 4: mod_base = OTHER; note = 2'-deoxy-2'-fluorouridine-3'-phosphate
  modified_base 5: mod_base = OTHER; note = 2'-O-methylguanosine-3'-phosphate
  modified_base 6: mod_base = OTHER; note = 2'-deoxy-2'-fluoroguanosine-3'-phosphate
  modified_base 7: mod_base = OTHER; note = 2'-O-methyluridine-3'-phosphate
  modified_base 8: mod_base = OTHER; note = 2'-deoxy-2'-fluorouridine-3'-phosphate
  modified_base 9: mod_base = OTHER; note = 2'-O-methyladenosine-3'-phosphate
  modified_base 10: mod_base = OTHER; note = 2'-deoxy-2'-fluorocytidine-3'-phosphate
  modified_base 11: mod_base = OTHER; note = 2'-O-methyladenosine-3'-phosphate
  modified_base 12: mod_base = OTHER; note = 2'-deoxy-2'-fluorouridine-3'-phosphate
  modified_base 13: mod_base = OTHER; note = 2'-O-methylguanosine-3'-phosphate
  modified_base 14: mod_base = OTHER; note = 2'-deoxy-2'-fluoroadenosine-3'-phosphate
  modified_base 15: mod_base = OTHER; note = 2'-deoxy-2'-fluoroadenosine-3'-phosphate
  modified_base 16: mod_base = OTHER; note = 2'-deoxy-2'-fluoroadenosine-3'-phosphate
  modified_base 17: mod_base = OTHER; note = 2'-O-methyluridine-3'-phosphate
  modified_base 18: mod_base = OTHER; note = 2'-deoxy-2'-fluorocytidine-3'-phosphate
  modified_base 19: mod_base = OTHER; note = 2'-O-methylcytidine-3'-phosphate
  modified_base 20: mod_base = OTHER; note = 2'-deoxy-2'-fluorocytidine-3'-phosphate
  modified_base 21: mod_base = OTHER; note = 2'-O-methyladenosine-3'-phosphorothioate
  modified_base 22: mod_base = OTHER; note = 2'-deoxy-2'-fluorouridine-3'-phosphorothioate
  modified_base 23: mod_base = OTHER; note = 2'-O-methylcytidine
tcttggttacatgaaatcccatc

SEQ ID NO: 497 - RNA, 23 nt, synthetic construct
  source 1..23: mol_type = other RNA
  modified_base 1: mod_base = OTHER; note = 2'-O-methyladenosine-3'-phosphate
  modified_base 2: mod_base = OTHER; note = 2'-deoxy-2'-fluorouridine-3'-phosphate
  modified_base 3: mod_base = OTHER; note = 2'-O-methylguanosine-3'-phosphate
  modified_base 4: mod_base = OTHER; note = 2'-deoxy-2'-fluoroguanosine-3'-phosphate
  modified_base 5: mod_base = OTHER; note = 2'-O-methyladenosine-3'-phosphate
  modified_base 6: mod_base = OTHER; note = 2'-deoxy-2'-fluoroadenosine-3'-phosphate
  modified_base 7: mod_base = OTHER; note = 2'-deoxy-2'-fluorouridine-3'-phosphate
  modified_base 8: mod_base = OTHER; note = 2'-deoxy-2'-fluoroadenosine-3'-phosphate
  modified_base 9: mod_base = OTHER; note = 2'-O-methylcytidine-3'-phosphate
  modified_base 10: mod_base = OTHER; note = 2'-O-methyluridine-3'-phosphate
  modified_base 11: mod_base = OTHER; note = 2'-O-methylcytidine-3'-phosphate
  modified_base 12: mod_base = OTHER; note = 2'-deoxy-2'-fluorouridine-3'-phosphate
  modified_base 13: mod_base = OTHER; note = 2'-O-methyluridine-3'-phosphate
  modified_base 14: mod_base = OTHER; note = 2'-deoxy-2'-fluoroguanosine-3'-phosphate
  modified_base 15: mod_base = OTHER; note = 2'-O-methylguanosine-3'-phosphate
  modified_base 16: mod_base = OTHER; note = 2'-deoxy-2'-fluorouridine-3'-phosphate
  modified_base 17: mod_base = OTHER; note = 2'-O-methyluridine-3'-phosphate
  modified_base 18: mod_base = OTHER; note = 2'-deoxy-2'-fluoroadenosine-3'-phosphate
  modified_base 19: mod_base = OTHER; note = 2'-O-methylcytidine-3'-phosphate
  modified_base 20: mod_base = OTHER; note = 2'-deoxy-2'-fluoroadenosine-3'-phosphate
  modified_base 21: mod_base = OTHER; note = 2'-O-methyluridine-3'-phosphorothioate
  modified_base 22: mod_base = OTHER; note = 2'-deoxy-2'-fluoroguanosine-3'-phosphorothioate
  modified_base 23: mod_base = OTHER; note = 2'-O-methyladenosine
atggaatactcttggttacatga

SEQ ID NO: 498 - DNA, 23 bp, synthetic construct
  source 1..23: mol_type = other DNA
  modified_base 1: mod_base = OTHER; note = 2'-O-methyladenosine-3'-phosphate
  modified_base 2: mod_base = OTHER; note = 2'-deoxy-2'-fluorouridine-3'-phosphate
  modified_base 3: mod_base = OTHER; note = 2'-O-methylguanosine-3'-phosphate
  modified_base 4: mod_base = OTHER; note = 2'-deoxy-2'-fluoroguanosine-3'-phosphate
  modified_base 5: mod_base = OTHER; note = 2'-O-methyladenosine-3'-phosphate
  modified_base 10: mod_base = OTHER; note = 2'-deoxy-2'-fluorouridine-3'-phosphate
  modified_base 11: mod_base = OTHER; note = 2'-O-methylcytidine-3'-phosphate
  modified_base 12: mod_base = OTHER; note = 2'-deoxy-2'-fluorouridine-3'-phosphate
  modified_base 13: mod_base = OTHER; note = 2'-O-methyluridine-3'-phosphate
  modified_base 14: mod_base = OTHER; note = 2'-deoxy-2'-fluoroguanosine-3'-phosphate
  modified_base 15: mod_base = OTHER; note = 2'-O-methylguanosine-3'-phosphate
  modified_base 16: mod_base = OTHER; note = 2'-deoxy-2'-fluorouridine-3'-phosphate
  modified_base 17: mod_base = OTHER; note = 2'-O-methyluridine-3'-phosphate
  modified_base 18: mod_base = OTHER; note = 2'-deoxy-2'-fluoroadenosine-3'-phosphate
  modified_base 19: mod_base = OTHER; note = 2'-O-methylcytidine-3'-phosphate
  modified_base 20: mod_base = OTHER; note = 2'-deoxy-2'-fluoroadenosine-3'-phosphate
  modified_base 21: mod_base = OTHER; note = 2'-O-methyluridine-3'-phosphorothioate
  modified_base 22: mod_base = OTHER; note = 2'-deoxy-2'-fluoroguanosine-3'-phosphorothioate
  modified_base 23: mod_base = OTHER; note = 2'-O-methyladenosine
  misc_feature 1..5: note = RNA
  misc_feature 10..23: note = RNA
  misc_feature 6..9: note = DNA
atggaatactcttggttacatga

SEQ ID NO: 499 - RNA, 23 nt, synthetic construct
  source 1..23: mol_type = other RNA
  modified_base 1: mod_base = OTHER; note = 2'-O-methyladenosine-3'-phosphate
  modified_base 2: mod_base = OTHER; note = 2'-deoxy-2'-fluorouridine-3'-phosphate
  modified_base 3: mod_base = OTHER; note = 2'-deoxy-2'-fluoroguanosine-3'-phosphate
  modified_base 4: mod_base = OTHER; note = 2'-O-methylguanosine-3'-phosphate
  modified_base 5: mod_base = OTHER; note = 2'-O-methyladenosine-3'-phosphate
  modified_base 6: mod_base = OTHER; note = 2'-deoxy-2'-fluoroadenosine-3'-phosphate
  modified_base 7: mod_base = OTHER; note = 2'-deoxy-2'-fluorouridine-3'-phosphate
  modified_base 8: mod_base = OTHER; note = 2'-O-methyladenosine-3'-phosphate
  modified_base 9: mod_base = OTHER; note = 2'-O-methylcytidine-3'-phosphate
  modified_base 10: mod_base = OTHER; note = 2'-deoxy-2'-fluorouridine-3'-phosphate
  modified_base 11: mod_base = OTHER; note = 2'-deoxy-2'-fluorocytidine-3'-phosphate
  modified_base 12: mod_base = OTHER; note = 2'-O-methyluridine-3'-phosphate
  modified_base 13: mod_base = OTHER; note = 2'-O-methyluridine-3'-phosphate
  modified_base 14: mod_base = OTHER; note = 2'-deoxy-2'-fluoroguanosine-3'-phosphate
  modified_base 15: mod_base = OTHER; note = 2'-deoxy-2'-fluoroguanosine-3'-phosphate
  modified_base 16: mod_base = OTHER; note = 2'-O-methyluridine-3'-phosphate
  modified_base 17: mod_base = OTHER; note = 2'-O-methyluridine-3'-phosphate
  modified_base 18: mod_base = OTHER; note = 2'-deoxy-2'-fluoroadenosine-3'-phosphate
  modified_base 19: mod_base = OTHER; note = 2'-deoxy-2'-fluorocytidine-3'-phosphate
  modified_base 20: mod_base = OTHER; note = 2'-O-methyladenosine-3'-phosphate
  modified_base 21: mod_base = OTHER; note = 2'-O-methyluridine-3'-phosphorothioate
  modified_base 22: mod_base = OTHER; note = 2'-deoxy-2'-fluoroguanosine-3'-phosphorothioate
  modified_base 23: mod_base = OTHER; note = 2'-O-methyladenosine
atggaatactcttggttacatga

SEQ ID NO: 500 - DNA, 23 bp, synthetic construct
  source 1..23: mol_type = other DNA
  modified_base 1: mod_base = OTHER; note = 2'-O-methyladenosine-3'-phosphate
  modified_base 2: mod_base = OTHER; note = 2'-deoxy-2'-fluorouridine-3'-phosphate
  modified_base 3: mod_base = OTHER; note = 2'-O-methylguanosine-3'-phosphate
  modified_base 4: mod_base = OTHER; note = 2'-deoxy-2'-fluoroguanosine-3'-phosphate
  modified_base 9: mod_base = OTHER; note = 2'-O-methylcytidine-3'-phosphate
  modified_base 10: mod_base = OTHER; note = 2'-deoxy-2'-fluorouridine-3'-phosphate
  modified_base 11: mod_base = OTHER; note = 2'-O-methylcytidine-3'-phosphate
  modified_base 12: mod_base = OTHER; note = 2'-deoxy-2'-fluorouridine-3'-phosphate
  modified_base 13: mod_base = OTHER; note = 2'-O-methyluridine-3'-phosphate
  modified_base 14: mod_base = OTHER; note = 2'-deoxy-2'-fluoroguanosine-3'-phosphate
  modified_base 15: mod_base = OTHER; note = 2'-O-methylguanosine-3'-phosphate
  modified_base 16: mod_base = OTHER; note = 2'-deoxy-2'-fluorouridine-3'-phosphate
  modified_base 17: mod_base = OTHER; note = 2'-O-methyluridine-3'-phosphate
  modified_base 18: mod_base = OTHER; note = 2'-deoxy-2'-fluoroadenosine-3'-phosphate
  modified_base 19: mod_base = OTHER; note = 2'-O-methylcytidine-3'-phosphate
  modified_base 20: mod_base = OTHER; note = 2'-deoxy-2'-fluoroadenosine-3'-phosphate
  modified_base 21: mod_base = OTHER; note = 2'-O-methyluridine-3'-phosphorothioate
  modified_base 22: mod_base = OTHER; note = 2'-deoxy-2'-fluoroguanosine-3'-phosphorothioate
  modified_base 23: mod_base = OTHER; note = 2'-O-methyladenosine
  misc_feature 1..4: note = RNA
  misc_feature 9..23: note = RNA
  misc_feature 5..8: note = DNA
atggaatactcttggttacatga

SEQ ID NO: 501 - DNA, 23 bp, synthetic construct
  source 1..23: mol_type = other DNA
  modified_base 1: mod_base = OTHER; note = 2'-O-methyladenosine-3'-phosphate
  modified_base 2: mod_base = OTHER; note = 2'-deoxy-2'-fluorouridine-3'-phosphate
  modified_base 3: mod_base = OTHER; note = 2'-O-methylguanosine-3'-phosphate
  modified_base 8: mod_base = OTHER; note = 2'-deoxy-2'-fluoroadenosine-3'-phosphate
  modified_base 9: mod_base = OTHER; note = 2'-O-methylcytidine-3'-phosphate
  modified_base 10: mod_base = OTHER; note = 2'-deoxy-2'-fluorouridine-3'-phosphate
  modified_base 11: mod_base = OTHER; note = 2'-O-methylcytidine-3'-phosphate
  modified_base 12: mod_base = OTHER; note = 2'-deoxy-2'-fluorouridine-3'-phosphate
  modified_base 13: mod_base = OTHER; note = 2'-O-methyluridine-3'-phosphate
  modified_base 14: mod_base = OTHER; note = 2'-deoxy-2'-fluoroguanosine-3'-phosphate
  modified_base 15: mod_base = OTHER; note = 2'-O-methylguanosine-3'-phosphate
  modified_base 16: mod_base = OTHER; note = 2'-deoxy-2'-fluorouridine-3'-phosphate
  modified_base 17: mod_base = OTHER; note = 2'-O-methyluridine-3'-phosphate
  modified_base 18: mod_base = OTHER; note = 2'-deoxy-2'-fluoroadenosine-3'-phosphate
  modified_base 19: mod_base = OTHER; note = 2'-O-methylcytidine-3'-phosphate
  modified_base 20: mod_base = OTHER; note = 2'-deoxy-2'-fluoroadenosine-3'-phosphate
  modified_base 21: mod_base = OTHER; note = 2'-O-methyluridine-3'-phosphorothioate
  modified_base 22: mod_base = OTHER; note = 2'-deoxy-2'-fluoroguanosine-3'-phosphorothioate
  modified_base 23: mod_base = OTHER; note = 2'-O-methyladenosine
  misc_feature 1..3: note = RNA
  misc_feature 8..23: note = RNA
  misc_feature 4..7: note = DNA
atggaatactcttggttacatga

SEQ ID NO: 502 - RNA, 23 nt, synthetic construct
  source 1..23: mol_type = other RNA
  modified_base 1: mod_base = OTHER; note = 2'-deoxy-2'-fluoroadenosine-3'-phosphate
  modified_base 2: mod_base = OTHER; note = 2'-deoxy-2'-fluorouridine-3'-phosphate
  modified_base 3: mod_base = OTHER; note = 2'-O-methylguanosine-3'-phosphate
  modified_base 4: mod_base = OTHER; note = 2'-deoxy-2'-fluoroguanosine-3'-phosphate
  modified_base 5: mod_base = OTHER; note = 2'-O-methyladenosine-3'-phosphate
  modified_base 6: mod_base = OTHER; note = 2'-deoxy-2'-fluoroadenosine-3'-phosphate
  modified_base 7: mod_base = OTHER; note = 2'-O-methyluridine-3'-phosphate
  modified_base 8: mod_base = OTHER; note = 2'-deoxy-2'-fluoroadenosine-3'-phosphate
  modified_base 9: mod_base = OTHER; note = 2'-O-methylcytidine-3'-phosphate
  modified_base 10: mod_base = OTHER; note = 2'-deoxy-2'-fluorouridine-3'-phosphate
  modified_base 11: mod_base = OTHER; note = 2'-O-methylcytidine-3'-phosphate
  modified_base 12: mod_base = OTHER; note = 2'-deoxy-2'-fluorouridine-3'-phosphate
  modified_base 13: mod_base = OTHER; note = 2'-O-methyluridine-3'-phosphate
  modified_base 14: mod_base = OTHER; note = 2'-deoxy-2'-fluoroguanosine-3'-phosphate
  modified_base 15: mod_base = OTHER; note = 2'-O-methylguanosine-3'-phosphate
  modified_base 16: mod_base = OTHER; note = 2'-deoxy-2'-fluorouridine-3'-phosphate
  modified_base 17: mod_base = OTHER; note = 2'-O-methyluridine-3'-phosphate
  modified_base 18: mod_base = OTHER; note = 2'-deoxy-2'-fluoroadenosine-3'-phosphate
  modified_base 19: mod_base = OTHER; note = 2'-O-methylcytidine-3'-phosphate
  modified_base 20: mod_base = OTHER; note = 2'-deoxy-2'-fluoroadenosine-3'-phosphate
  modified_base 21: mod_base = OTHER; note = 2'-O-methyluridine-3'-phosphorothioate
  modified_base 22: mod_base = OTHER; note = 2'-deoxy-2'-fluoroguanosine-3'-phosphorothioate
  modified_base 23: mod_base = OTHER; note = 2'-O-methyladenosine
atggaatactcttggttacatga

SEQ ID NO: 503 - DNA, 23 bp, synthetic construct
  source 1..23: mol_type = other DNA
  modified_base 2: mod_base = OTHER; note = uridine-3'-phosphate
  modified_base 4: mod_base = OTHER; note = guanosine-3'-phosphate
  modified_base 6: mod_base = OTHER; note = 2'-O-methyladenosine-3'-phosphate
  modified_base 8: mod_base = OTHER; note = 2'-deoxy-2'-fluoroadenosine-3'-phosphate
  modified_base 9: mod_base = OTHER; note = 2'-O-methylcytidine-3'-phosphate
  modified_base 10: mod_base = OTHER; note = 2'-deoxy-2'-fluorouridine-3'-phosphate
  modified_base 11: mod_base = OTHER; note = 2'-O-methylcytidine-3'-phosphate
  modified_base 12: mod_base = OTHER; note = 2'-deoxy-2'-fluorouridine-3'-phosphate
  modified_base 13: mod_base = OTHER; note = 2'-O-methyluridine-3'-phosphate
  modified_base 14: mod_base = OTHER; note = 2'-deoxy-2'-fluoroguanosine-3'-phosphate
  modified_base 15: mod_base = OTHER; note = 2'-O-methylguanosine-3'-phosphate
  modified_base 16: mod_base = OTHER; note = 2'-deoxy-2'-fluorouridine-3'-phosphate
  modified_base 17: mod_base = OTHER; note = 2'-O-methyluridine-3'-phosphate
  modified_base 18: mod_base = OTHER; note = 2'-deoxy-2'-fluoroadenosine-3'-phosphate
  modified_base 19: mod_base = OTHER; note = 2'-O-methylcytidine-3'-phosphate
  modified_base 20: mod_base = OTHER; note = 2'-deoxy-2'-fluoroadenosine-3'-phosphate
  modified_base 21: mod_base = OTHER; note = 2'-O-methyluridine-3'-phosphorothioate
  modified_base 22: mod_base = OTHER; note = 2'-deoxy-2'-fluoroguanosine-3'-phosphorothioate
  modified_base 23: mod_base = OTHER; note = 2'-O-methyladenosine
  misc_feature 2: note = RNA
  misc_feature 4: note = RNA
  misc_feature 6: note = RNA
  misc_feature 8..23: note = RNA
  misc_feature 1: note = DNA
  misc_feature 5: note = DNA
  misc_feature 7: note = DNA
atggaatactcttggttacatga

SEQ ID NO: 504 - DNA, 23 bp, synthetic construct
  source 1..23: mol_type = other DNA
  modified_base 2: mod_base = OTHER; note = 2'-O-methyluridine-3'-phosphate
  modified_base 4: mod_base = OTHER; note = 2'-O-methylguanosine-3'-phosphate
  modified_base 6: mod_base = OTHER; note = 2'-O-methyladenosine-3'-phosphate
  modified_base 8: mod_base = OTHER; note = 2'-deoxy-2'-fluoroadenosine-3'-phosphate
  modified_base 9: mod_base = OTHER; note = 2'-O-methylcytidine-3'-phosphate
  modified_base 10: mod_base = OTHER; note = 2'-deoxy-2'-fluorouridine-3'-phosphate
  modified_base 11: mod_base = OTHER; note = 2'-O-methylcytidine-3'-phosphate
  modified_base 12: mod_base = OTHER; note = 2'-deoxy-2'-fluorouridine-3'-phosphate
  modified_base 13: mod_base = OTHER; note = 2'-O-methyluridine-3'-phosphate
  modified_base 14: mod_base = OTHER; note = 2'-deoxy-2'-fluoroguanosine-3'-phosphate
  modified_base 15: mod_base = OTHER; note = 2'-O-methylguanosine-3'-phosphate
  modified_base 16: mod_base = OTHER; note = 2'-deoxy-2'-fluorouridine-3'-phosphate
  modified_base 17: mod_base = OTHER; note = 2'-O-methyluridine-3'-phosphate
  modified_base 18: mod_base = OTHER; note = 2'-deoxy-2'-fluoroadenosine-3'-phosphate
  modified_base 19: mod_base = OTHER; note = 2'-O-methylcytidine-3'-phosphate
  modified_base 20: mod_base = OTHER; note = 2'-deoxy-2'-fluoroadenosine-3'-phosphate
  modified_base 21: mod_base = OTHER; note = 2'-O-methyluridine-3'-phosphorothioate
  modified_base 22: mod_base = OTHER; note = 2'-deoxy-2'-fluoroguanosine-3'-phosphorothioate
  modified_base 23: mod_base = OTHER; note = 2'-O-methyladenosine
  misc_feature 2: note = RNA
  misc_feature 4: note = RNA
  misc_feature 6: note = RNA
  misc_feature 8..23: note = RNA
  misc_feature 1: note = DNA
  misc_feature 5: note = DNA
  misc_feature 7: note = DNA
atggaatactcttggttacatga

SEQ ID NO: 505 - RNA, 23 nt, synthetic construct
  source 1..23: mol_type = other RNA
  modified_base 1: mod_base = OTHER; note = 2'-O-methyladenosine-3'-phosphate
  modified_base 2: mod_base = OTHER; note = 2'-deoxy-2'-fluorouridine-3'-phosphate
  modified_base 3: mod_base = OTHER; note = 2'-O-methylguanosine-3'-phosphate
  modified_base 4: mod_base = OTHER; note = 2'-deoxy-2'-fluoroguanosine-3'-phosphate
  modified_base 5: mod_base = OTHER; note = 2'-deoxy-2'-fluoroadenosine-3'-phosphate
  modified_base 6: mod_base = OTHER; note = 2'-deoxy-2'-fluoroadenosine-3'-phosphate
  modified_base 7: mod_base = OTHER; note = 2'-O-methyluridine-3'-phosphate
  modified_base 8: mod_base = OTHER; note = 2'-deoxy-2'-fluoroadenosine-3'-phosphate
  modified_base 9: mod_base = OTHER; note = 2'-O-methylcytidine-3'-phosphate
  modified_base 10: mod_base = OTHER; note = 2'-O-methyluridine-3'-phosphate
  modified_base 11: mod_base = OTHER; note = 2'-O-methylcytidine-3'-phosphate
  modified_base 12: mod_base = OTHER; note = 2'-deoxy-2'-fluorouridine-3'-phosphate
  modified_base 13: mod_base = OTHER; note = 2'-O-methyluridine-3'-phosphate
  modified_base 14: mod_base = OTHER; note = 2'-deoxy-2'-fluoroguanosine-3'-phosphate
  modified_base 15: mod_base = OTHER; note = 2'-O-methylguanosine-3'-phosphate
  modified_base 16: mod_base = OTHER; note = 2'-deoxy-2'-fluorouridine-3'-phosphate
  modified_base 17: mod_base = OTHER; note = 2'-O-methyluridine-3'-phosphate
  modified_base 18: mod_base = OTHER; note = 2'-deoxy-2'-fluoroadenosine-3'-phosphate
  modified_base 19: mod_base = OTHER; note = 2'-O-methylcytidine-3'-phosphate
  modified_base 20: mod_base = OTHER; note = 2'-deoxy-2'-fluoroadenosine-3'-phosphate
  modified_base 21: mod_base = OTHER; note = 2'-O-methyluridine-3'-phosphorothioate
  modified_base 22: mod_base = OTHER; note = 2'-deoxy-2'-fluoroguanosine-3'-phosphorothioate
  modified_base 23: mod_base = OTHER; note = 2'-O-methyladenosine
atggaatactcttggttacatga

SEQ ID NO: 506 - DNA, 23 bp, synthetic construct
  source 1..23: mol_type = other DNA
  modified_base 5: mod_base = OTHER; note = 2'-O-methyladenosine-3'-phosphate
  modified_base 6: mod_base = OTHER; note = 2'-deoxy-2'-fluoroadenosine-3'-phosphate
  modified_base 7: mod_base = OTHER; note = 2'-O-methyluridine-3'-phosphate
  modified_base 8: mod_base = OTHER; note = 2'-deoxy-2'-fluoroadenosine-3'-phosphate
  modified_base 9: mod_base = OTHER; note = 2'-O-methylcytidine-3'-phosphate
  modified_base 10: mod_base = OTHER; note = 2'-deoxy-2'-fluorouridine-3'-phosphate
  modified_base 11: mod_base = OTHER; note = 2'-O-methylcytidine-3'-phosphate
  modified_base 12: mod_base = OTHER; note = 2'-deoxy-2'-fluorouridine-3'-phosphate
  modified_base 13: mod_base = OTHER; note = 2'-O-methyluridine-3'-phosphate
  modified_base 14: mod_base = OTHER; note = 2'-deoxy-2'-fluoroguanosine-3'-phosphate
  modified_base 15: mod_base = OTHER; note = 2'-O-methylguanosine-3'-phosphate
  modified_base 16: mod_base = OTHER; note = 2'-deoxy-2'-fluorouridine-3'-phosphate
  modified_base 17: mod_base = OTHER; note = 2'-O-methyluridine-3'-phosphate
  modified_base 18: mod_base = OTHER; note = 2'-deoxy-2'-fluoroadenosine-3'-phosphate
  modified_base 19: mod_base = OTHER; note = 2'-O-methylcytidine-3'-phosphate
  modified_base 20: mod_base = OTHER; note = 2'-deoxy-2'-fluoroadenosine-3'-phosphate
  modified_base 21: mod_base = OTHER; note = 2'-O-methyluridine-3'-phosphorothioate
  modified_base 22: mod_base = OTHER; note = 2'-deoxy-2'-fluoroguanosine-3'-phosphorothioate
  modified_base 23: mod_base = OTHER; note = 2'-O-methyladenosine
  misc_feature 5..23: note = RNA
  misc_feature 1..4: note = DNA
atggaatactcttggttacatga

SEQ ID NO: 507 - DNA, 23 bp, synthetic construct
  source 1..23: mol_type = other DNA
  modified_base 1: mod_base = OTHER; note = 2'-O-methyladenosine-3'-phosphate
  modified_base 2: mod_base = OTHER; note = 2'-deoxy-2'-fluorouridine-3'-phosphate
  modified_base 3: mod_base = OTHER; note = 2'-O-methylguanosine-3'-phosphate
  modified_base 4: mod_base = OTHER; note = 2'-deoxy-2'-fluoroguanosine-3'-phosphate
  modified_base 5: mod_base = OTHER; note = 2'-O-methyladenosine-3'-phosphate
  modified_base 6: mod_base = OTHER; note = 2'-deoxy-2'-fluoroadenosine-3'-phosphate
  modified_base 7: mod_base = OTHER; note = 2'-O-methyluridine-3'-phosphate
  modified_base 9: mod_base = OTHER; note = 2'-deoxy-2'-fluorocytidine-3'-phosphate
  modified_base 10: mod_base = OTHER; note = 2'-O-methyluridine-3'-phosphate
  modified_base 12: mod_base = OTHER; note = 2'-deoxy-2'-fluorouridine-3'-phosphate
  modified_base 13: mod_base = OTHER; note = 2'-O-methyluridine-3'-phosphate
  modified_base 15: mod_base = OTHER; note = 2'-deoxy-2'-fluoroguanosine-3'-phosphate
  modified_base 16: mod_base = OTHER; note = 2'-O-methyluridine-3'-phosphate
  modified_base 18: mod_base = OTHER; note = 2'-deoxy-2'-fluoroadenosine-3'-phosphate
  modified_base 19: mod_base = OTHER; note = 2'-O-methylcytidine-3'-phosphate
  modified_base 20: mod_base = OTHER; note = 2'-deoxy-2'-fluoroadenosine-3'-phosphate
  modified_base 21: mod_base = OTHER; note = 2'-O-methyluridine-3'-phosphorothioate
  modified_base 22: mod_base = OTHER; note = 2'-O-methylguanosine-3'-phosphorothioate
  modified_base 23: mod_base = OTHER; note = 2'-O-methyladenosine
  misc_feature 1..7: note = RNA
  misc_feature 9..10: note = RNA
  misc_feature 12..13: note = RNA
  misc_feature 15..16: note = RNA
  misc_feature 18..23: note = RNA
  misc_feature 8: note = DNA
  misc_feature 11: note = DNA
  misc_feature 14: note = DNA
  misc_feature 17: note = DNA
atggaatactcttggttacatga

SEQ ID NO: 508 - DNA, 23 bp, synthetic construct
  source 1..23: mol_type = other DNA
  modified_base 1: mod_base = OTHER; note = 2'-O-methyladenosine-3'-phosphate
  modified_base 4: mod_base = OTHER; note = 2'-deoxy-2'-fluoroguanosine-3'-phosphate
  modified_base 5: mod_base = OTHER; note = 2'-O-methyladenosine-3'-phosphate
  modified_base 6: mod_base = OTHER; note = 2'-deoxy-2'-fluoroadenosine-3'-phosphate
  modified_base 9: mod_base = OTHER; note = 2'-O-methylcytidine-3'-phosphate
  modified_base 10: mod_base = OTHER; note = 2'-deoxy-2'-fluorouridine-3'-phosphate
  modified_base 11: mod_base = OTHER; note = 2'-O-methylcytidine-3'-phosphate
  modified_base 12: mod_base = OTHER; note = 2'-deoxy-2'-fluorouridine-3'-phosphate
  modified_base 13: mod_base = OTHER; note = 2'-O-methyluridine-3'-phosphate
  modified_base 14: mod_base = OTHER; note = 2'-deoxy-2'-fluoroguanosine-3'-phosphate
  modified_base 15: mod_base = OTHER; note = 2'-O-methylguanosine-3'-phosphate
  modified_base 16: mod_base = OTHER; note = 2'-deoxy-2'-fluorouridine-3'-phosphate
  modified_base 17: mod_base = OTHER; note = 2'-O-methyluridine-3'-phosphate
  modified_base 18: mod_base = OTHER; note = 2'-deoxy-2'-fluoroadenosine-3'-phosphate
  modified_base 19: mod_base = OTHER; note = 2'-O-methylcytidine-3'-phosphate
  modified_base 20: mod_base = OTHER; note = 2'-deoxy-2'-fluoroadenosine-3'-phosphate
  modified_base 21: mod_base = OTHER; note = 2'-O-methyluridine-3'-phosphorothioate
  modified_base 22: mod_base = OTHER; note = 2'-deoxy-2'-fluoroguanosine-3'-phosphorothioate
  modified_base 23: mod_base = OTHER; note = 2'-O-methyladenosine
  misc_feature 1: note = RNA
  misc_feature 4..6: note = RNA
  misc_feature 9..23: note = RNA
  misc_feature 2..3: note = DNA
  misc_feature 7..8: note = DNA
atggaatactcttggttacatga

SEQ ID NO: 509 - RNA, 23 nt, synthetic construct
  source 1..23: mol_type = other RNA
  modified_base 1: mod_base = OTHER; note = 2'-O-methyladenosine-3'-phosphate
  modified_base 2: mod_base = OTHER; note = 2'-deoxy-2'-fluorouridine-3'-phosphate
  modified_base 3: mod_base = OTHER; note = 2'-O-methylguanosine-3'-phosphate
  modified_base 4: mod_base = OTHER; note = 2'-deoxy-2'-fluoroguanosine-3'-phosphate
  modified_base 5: mod_base = OTHER; note = 2'-O-methyladenosine-3'-phosphate
  modified_base 6: mod_base = OTHER; note = 2'-deoxy-2'-fluoroadenosine-3'-phosphate
  modified_base 7: mod_base = OTHER; note = 2'-deoxy-2'-fluorouridine-3'-phosphate
  modified_base 8: mod_base = OTHER; note = 2'-deoxy-2'-fluoroadenosine-3'-phosphate
  modified_base 9: mod_base = OTHER; note = 2'-O-methylcytidine-3'-phosphate
  modified_base 10: mod_base = OTHER; note = 2'-deoxy-2'-fluorouridine-3'-phosphate
  modified_base 11: mod_base = OTHER; note = 2'-O-methylcytidine-3'-phosphate
  modified_base 12: mod_base = OTHER; note = 2'-deoxy-2'-fluorouridine-3'-phosphate
  modified_base 13: mod_base = OTHER; note = 2'-O-methyluridine-3'-phosphate
  modified_base 14: mod_base = OTHER; note = 2'-deoxy-2'-fluoroguanosine-3'-phosphate
  modified_base 15: mod_base = OTHER; note = 2'-O-methylguanosine-3'-phosphate
  modified_base 16: mod_base = OTHER; note = 2'-O-methyluridine-3'-phosphate
  modified_base 17: mod_base = OTHER; note = 2'-O-methyluridine-3'-phosphate
  modified_base 18: mod_base = OTHER; note = 2'-deoxy-2'-fluoroadenosine-3'-phosphate
  modified_base 19: mod_base = OTHER; note = 2'-O-methylcytidine-3'-phosphate
  modified_base 20: mod_base = OTHER; note = 2'-deoxy-2'-fluoroadenosine-3'-phosphate
  modified_base 21: mod_base = OTHER; note = 2'-O-methyluridine-3'-phosphorothioate
  modified_base 22: mod_base = OTHER; note = 2'-deoxy-2'-fluoroguanosine-3'-phosphorothioate
  modified_base 23: mod_base = OTHER; note = 2'-O-methyladenosine
atggaatactcttggttacatga

SEQ ID NO: 510 - RNA, 23 nt, synthetic construct
  source 1..23: mol_type = other RNA
  modified_base 1: mod_base = OTHER; note = 2'-O-methyladenosine-3'-phosphate
  modified_base 2: mod_base = OTHER; note = 2'-deoxy-2'-fluorouridine-3'-phosphate
  modified_base 3: mod_base = OTHER; note = 2'-O-methylguanosine-3'-phosphate
  modified_base 4: mod_base = OTHER; note = 2'-deoxy-2'-fluoroguanosine-3'-phosphate
  modified_base 5: mod_base = OTHER; note = 2'-O-methyladenosine-3'-phosphate
  modified_base 6: mod_base = OTHER; note = 2'-deoxy-2'-fluoroadenosine-3'-phosphate
  modified_base 7: mod_base = OTHER; note = 2'-deoxy-2'-fluorouridine-3'-phosphate
  modified_base 8: mod_base = OTHER; note = 2'-deoxy-2'-fluoroadenosine-3'-phosphate
  modified_base 9: mod_base = OTHER; note = 2'-O-methylcytidine-3'-phosphate
  modified_base 10: mod_base = OTHER; note = 2'-deoxy-2'-fluorouridine-3'-phosphate
  modified_base 11: mod_base = OTHER; note = 2'-O-methylcytidine-3'-phosphate
  modified_base 12: mod_base = OTHER; note = 2'-deoxy-2'-fluorouridine-3'-phosphate
  modified_base 13: mod_base = OTHER; note = 2'-O-methyluridine-3'-phosphate
  modified_base 14: mod_base = OTHER; note = 2'-deoxy-2'-fluoroguanosine-3'-phosphate
  modified_base 15: mod_base = OTHER; note = 2'-O-methylguanosine-3'-phosphate
  modified_base 16: mod_base = OTHER; note = 2'-deoxy-2'-fluorouridine-3'-phosphate
  modified_base 17: mod_base = OTHER; note = 2'-O-methyluridine-3'-phosphate
  modified_base 18: mod_base = OTHER; note = 2'-O-methyladenosine-3'-phosphate
  modified_base 19: mod_base = OTHER; note = 2'-O-methylcytidine-3'-phosphate
  modified_base 20: mod_base = OTHER; note = 2'-deoxy-2'-fluoroadenosine-3'-phosphate
  modified_base 21: mod_base = OTHER; note = 2'-O-methyluridine-3'-phosphorothioate
  modified_base 22: mod_base = OTHER; note = 2'-deoxy-2'-fluoroguanosine-3'-phosphorothioate
  modified_base 23: mod_base = OTHER; note = 2'-O-methyladenosine
atggaatactcttggttacatga

SEQ ID NO: 511 - RNA, 23 nt, synthetic construct
  source 1..23: mol_type = other RNA
  modified_base 1: mod_base = OTHER; note = 2'-O-methyladenosine-3'-phosphate
  modified_base 2: mod_base = OTHER; note = 2'-deoxy-2'-fluorouridine-3'-phosphate
  modified_base 3: mod_base = OTHER; note = 2'-O-methylguanosine-3'-phosphate
  modified_base 4: mod_base = OTHER; note = 2'-deoxy-2'-fluoroguanosine-3'-phosphate
  modified_base 5: mod_base = OTHER; note = 2'-O-methyladenosine-3'-phosphate
  modified_base 6: mod_base = OTHER; note = 2'-deoxy-2'-fluoroadenosine-3'-phosphate
  modified_base 7: mod_base = OTHER; note = 2'-O-methyluridine-3'-phosphate
  modified_base 8: mod_base = OTHER; note = 2'-deoxy-2'-fluoroadenosine-3'-phosphate
  modified_base 9: mod_base = OTHER; note = 2'-O-methylcytidine-3'-phosphate
  modified_base 10: mod_base = OTHER; note = 2'-deoxy-2'-fluorouridine-3'-phosphate
  modified_base 11: mod_base = OTHER; note = 2'-deoxy-2'-fluorocytidine-3'-phosphate
  modified_base 12: mod_base = OTHER; note = 2'-O-methyluridine-3'-phosphate
  modified_base 13: mod_base = OTHER; note = 2'-O-methyluridine-3'-phosphate
  modified_base 14: mod_base = OTHER; note = 2'-deoxy-2'-fluoroguanosine-3'-phosphate
  modified_base 15: mod_base = OTHER; note = 2'-deoxy-2'-fluoroguanosine-3'-phosphate
  modified_base 16: mod_base = OTHER; note = 2'-O-methyluridine-3'-phosphate
  modified_base 17: mod_base = OTHER; note = 2'-O-methyluridine-3'-phosphate
  modified_base 18: mod_base = OTHER; note = 2'-deoxy-2'-fluoroadenosine-3'-phosphate
  modified_base 19: mod_base = OTHER; note = 2'-deoxy-2'-fluorocytidine-3'-phosphate
  modified_base 20: mod_base = OTHER; note = 2'-O-methyladenosine-3'-phosphate
  modified_base 21: mod_base = OTHER; note = 2'-deoxy-2'-fluorouridine-3'-phosphorothioate
  modified_base 22: mod_base = OTHER; note = 2'-O-methylguanosine-3'-phosphorothioate
  modified_base 23: mod_base = OTHER; note = 2'-O-methyladenosine
atggaatactcttggttacatga

SEQ ID NO: 512 - RNA, 23 nt, synthetic construct
  source 1..23: mol_type = other RNA
  modified_base 1: mod_base = OTHER; note = 2'-deoxy-2'-fluoroadenosine-3'-phosphate
  modified_base 2: mod_base = OTHER; note = 2'-deoxy-2'-fluorouridine-3'-phosphate
  modified_base 3: mod_base = OTHER; note = 2'-O-methylguanosine-3'-phosphate
  modified_base 4: mod_base = OTHER; note = 2'-deoxy-2'-fluoroguanosine-3'-phosphate
  modified_base 5: mod_base = OTHER; note = 2'-O-methyladenosine-3'-phosphate
  modified_base 6: mod_base = OTHER; note = 2'-deoxy-2'-fluoroadenosine-3'-phosphate
  modified_base 7: mod_base = OTHER; note = 2'-O-methyluridine-3'-phosphate
  modified_base 8: mod_base = OTHER; note = 2'-O-methyladenosine-3'-phosphate
  modified_base 9: mod_base = OTHER; note = 2'-O-methylcytidine-3'-phosphate
  modified_base 10: mod_base = OTHER; note = 2'-deoxy-2'-fluorouridine-3'-phosphate
  modified_base 11: mod_base = OTHER; note = 2'-O-methylcytidine-3'-phosphate
  modified_base 12: mod_base = OTHER; note = 2'-deoxy-2'-fluorouridine-3'-phosphate
  modified_base 13: mod_base = OTHER; note = 2'-O-methyluridine-3'-phosphate
  modified_base 14: mod_base = OTHER; note = 2'-deoxy-2'-fluoroguanosine-3'-phosphate
  modified_base 15: mod_base = OTHER; note = 2'-O-methylguanosine-3'-phosphate
  modified_base 16: mod_base = OTHER; note = 2'-deoxy-2'-fluorouridine-3'-phosphate
  modified_base 17: mod_base = OTHER; note = 2'-O-methyluridine-3'-phosphate
  modified_base 18: mod_base = OTHER; note = 2'-deoxy-2'-fluoroadenosine-3'-phosphate
  modified_base 19: mod_base = OTHER; note = 2'-O-methylcytidine-3'-phosphate
  modified_base 20: mod_base = OTHER; note = 2'-deoxy-2'-fluoroadenosine-3'-phosphate
  modified_base 21: mod_base = OTHER; note = 2'-O-methyluridine-3'-phosphorothioate
  modified_base 22: mod_base = OTHER; note = 2'-deoxy-2'-fluoroguanosine-3'-phosphorothioate
  modified_base 23: mod_base = OTHER; note = 2'-O-methyladenosine
atggaatactcttggttacatga

SEQ ID NO: 513 - RNA, 23 nt, synthetic construct
  source 1..23: mol_type = other RNA
  modified_base 1: mod_base = OTHER; note = 2'-O-methyladenosine-3'-phosphate
  modified_base 2: mod_base = OTHER; note = 2'-deoxy-2'-fluorouridine-3'-phosphate
  modified_base 3: mod_base = OTHER; note = 2'-O-methylguanosine-3'-phosphate
  modified_base 4: mod_base = OTHER; note = 2'-deoxy-2'-fluoroguanosine-3'-phosphate
  modified_base 5: mod_base = OTHER; note = 2'-O-methyladenosine-3'-phosphate
  modified_base 6: mod_base = OTHER; note = 2'-deoxy-2'-fluoroadenosine-3'-phosphate
  modified_base 7: mod_base = OTHER; note = 2'-O-methyluridine-3'-phosphate
  modified_base 8: mod_base = OTHER; note = 2'-deoxy-2'-fluoroadenosine-3'-phosphate
  modified_base 9: mod_base = OTHER; note = 2'-O-methylcytidine-3'-phosphate
  modified_base 10: mod_base = OTHER; note = 2'-deoxy-2'-fluorouridine-3'-phosphate
  modified_base 11: mod_base = OTHER; note = 2'-O-methylcytidine-3'-phosphate
  modified_base 12: mod_base = OTHER; note = 2'-deoxy-2'-fluorouridine-3'-phosphate
  modified_base 13: mod_base = OTHER; note = 2'-O-methyluridine-3'-phosphate
  modified_base 14: mod_base = OTHER; note = 2'-deoxy-2'-fluoroguanosine-3'-phosphate
  modified_base 15: mod_base = OTHER; note = 2'-O-methylguanosine-3'-phosphate
  modified_base 16: mod_base = OTHER; note = 2'-deoxy-2'-fluorouridine-3'-phosphate
  modified_base 17: mod_base = OTHER; note = 2'-O-methyluridine-3'-phosphate
  modified_base 18: mod_base = OTHER; note = 2'-deoxy-2'-fluoroadenosine-3'-phosphate
  modified_base 19: mod_base = OTHER; note = 2'-O-methylcytidine-3'-phosphate
  modified_base 20: mod_base = OTHER; note = 2'-deoxy-2'-fluoroadenosine-3'-phosphate
  modified_base 21: mod_base = OTHER; note = 2'-O-methyluridine-3'-phosphorothioate
  modified_base 22: mod_base = OTHER; note = 2'-O-methylguanosine-3'-phosphorothioate
  modified_base 23: mod_base = OTHER; note = 2'-O-methyladenosine
atggaatactcttggttacatga

SEQ ID NO: 514 - RNA, 23 nt, synthetic construct
  source 1..23: mol_type = other RNA
  modified_base 1: mod_base = OTHER; note = 2'-O-methyladenosine-3'-phosphate
  modified_base 2: mod_base = OTHER; note = 2'-deoxy-2'-fluorouridine-3'-phosphate
  modified_base 3: mod_base = OTHER; note = 2'-O-methylguanosine-3'-phosphate
  modified_base 4: mod_base = OTHER; note = 2'-deoxy-2'-fluoroguanosine-3'-phosphate
  modified_base 5: mod_base = OTHER; note = 2'-O-methyladenosine-3'-phosphate
  modified_base 6: mod_base = OTHER; note = 2'-deoxy-2'-fluoroadenosine-3'-phosphate
  modified_base 7: mod_base = OTHER; note = 2'-O-methyluridine-3'-phosphate
  modified_base 8: mod_base = OTHER; note = 2'-O-methyladenosine-3'-phosphate
  modified_base 9: mod_base = OTHER; note = 2'-O-methylcytidine-3'-phosphate
  modified_base 10: mod_base = OTHER; note = 2'-deoxy-2'-fluorouridine-3'-phosphate
  modified_base 11: mod_base = OTHER; note = 2'-O-methylcytidine-3'-phosphate
  modified_base 12: mod_base = OTHER; note = 2'-deoxy-2'-fluorouridine-3'-phosphate
  modified_base 13: mod_base = OTHER; note = 2'-O-methyluridine-3'-phosphate
  modified_base 14: mod_base = OTHER; note = 2'-deoxy-2'-fluoroguanosine-3'-phosphate
  modified_base 15: mod_base = OTHER; note = 2'-O-methylguanosine-3'-phosphate
  modified_base 16: mod_base = OTHER; note = 2'-deoxy-2'-fluorouridine-3'-phosphate
  modified_base 17: mod_base = OTHER; note = 2'-O-methyluridine-3'-phosphate
  modified_base 18: mod_base = OTHER; note = 2'-deoxy-2'-fluoroadenosine-3'-phosphate
  modified_base 19: mod_base = OTHER; note = 2'-O-methylcytidine-3'-phosphate
  modified_base 20: mod_base = OTHER; note = 2'-deoxy-2'-fluoroadenosine-3'-phosphate
  modified_base 21: mod_base = OTHER; note = 2'-O-methyluridine-3'-phosphorothioate
  modified_base 22: mod_base = OTHER; note = 2'-deoxy-2'-fluoroguanosine-3'-phosphorothioate
  modified_base 23: mod_base = OTHER; note = 2'-O-methyladenosine
atggaatactcttggttacatga

SEQ ID NO: 515 - RNA, 23 nt, synthetic construct
  source 1..23: mol_type = other RNA
  modified_base 1: mod_base = OTHER; note = 2'-O-methyladenosine-3'-phosphate
  modified_base 2: mod_base = OTHER; note = 2'-deoxy-2'-fluorouridine-3'-phosphate
  modified_base 3: mod_base = OTHER; note = 2'-O-methylguanosine-3'-phosphate
  modified_base 4: mod_base = OTHER; note = 2'-deoxy-2'-fluoroguanosine-3'-phosphate
  modified_base 5: mod_base = OTHER; note = 2'-O-methyladenosine-3'-phosphate
  modified_base 6: mod_base = OTHER; note = 2'-deoxy-2'-fluoroadenosine-3'-phosphate
  modified_base 7: mod_base = OTHER; note = 2'-deoxy-2'-fluorouridine-3'-phosphate
  modified_base 8: mod_base = OTHER; note = 2'-deoxy-2'-fluoroadenosine-3'-phosphate
  modified_base 9: mod_base = OTHER; note = 2'-O-methylcytidine-3'-phosphate
  modified_base 10: mod_base = OTHER; note = 2'-deoxy-2'-fluorouridine-3'-phosphate
  modified_base 11: mod_base = OTHER; note = 2'-O-methylcytidine-3'-phosphate
  modified_base 12: mod_base = OTHER; note = 2'-deoxy-2'-fluorouridine-3'-phosphate
  modified_base 13: mod_base = OTHER; note = 2'-O-methyluridine-3'-phosphate
  modified_base 14: mod_base = OTHER; note = 2'-deoxy-2'-fluoroguanosine-3'-phosphate
  modified_base 15: mod_base = OTHER; note = 2'-O-methylguanosine-3'-phosphate
  modified_base 16: mod_base = OTHER; note = 2'-deoxy-2'-fluorouridine-3'-phosphate
  modified_base 17: mod_base = OTHER; note = 2'-O-methyluridine-3'-phosphate
  modified_base 18: mod_base = OTHER; note = 2'-deoxy-2'-fluoroadenosine-3'-phosphate
  modified_base 19: mod_base = OTHER; note = 2'-O-methylcytidine-3'-phosphate
  modified_base 20: mod_base = OTHER; note = 2'-deoxy-2'-fluoroadenosine-3'-phosphate
  modified_base 21: mod_base = OTHER; note = 2'-O-methyluridine-3'-phosphorothioate
  modified_base 22: mod_base = OTHER; note = 2'-deoxy-2'-fluoroguanosine-3'-phosphorothioate
  modified_base 23: mod_base = OTHER; note = 2'-O-methyladenosine
atggaatactcttggttacatga

SEQ ID NO: 516 - RNA, 23 nt, synthetic construct
  source 1..23: mol_type = other RNA
  modified_base 1: mod_base = OTHER; note = 2'-O-methyladenosine-3'-phosphate
  modified_base 2: mod_base = OTHER; note = 2'-deoxy-2'-fluorouridine-3'-phosphate
  modified_base 3: mod_base = OTHER; note = 2'-O-methylguanosine-3'-phosphate
  modified_base 4: mod_base = OTHER; note = 2'-deoxy-2'-fluoroguanosine-3'-phosphate
  modified_base 5: mod_base = OTHER; note = 2'-O-methyladenosine-3'-phosphate
  modified_base 6: mod_base = OTHER; note = 2'-deoxy-2'-fluoroadenosine-3'-phosphate
  modified_base 7: mod_base = OTHER; note = 2'-O-methyluridine-3'-phosphate
  modified_base 8: mod_base = OTHER; note = 2'-deoxy-2'-fluoroadenosine-3'-phosphate
  modified_base 9: mod_base = OTHER; note = 2'-O-methylcytidine-3'-phosphate
  modified_base 10: mod_base = OTHER; note = 2'-deoxy-2'-fluorouridine-3'-phosphate
  modified_base 11: mod_base = OTHER; note = 2'-O-methylcytidine-3'-phosphate
  modified_base 12: mod_base = OTHER; note = 2'-deoxy-2'-fluorouridine-3'-phosphate
  modified_base 13: mod_base = OTHER; note = 2'-O-methyluridine-3'-phosphate
  modified_base 14: mod_base = OTHER; note = 2'-deoxy-2'-fluoroguanosine-3'-phosphate
  modified_base 15: mod_base = OTHER; note = 2'-O-methylguanosine-3'-phosphate
  modified_base 16: mod_base = OTHER; note = 2'-deoxy-2'-fluorouridine-3'-phosphate
  modified_base 17: mod_base = OTHER; note = 2'-O-methyluridine-3'-phosphate
  modified_base 18: mod_base = OTHER; note = 2'-deoxy-2'-fluoroadenosine-3'-phosphate
  modified_base 19: mod_base = OTHER; note = 2'-O-methylcytidine-3'-phosphate
  modified_base 20: mod_base = OTHER; note = 2'-deoxy-2'-fluoroadenosine-3'-phosphate
  modified_base 21: mod_base = OTHER; note = 2'-O-methyluridine-3'-phosphorothioate
  modified_base 22: mod_base = OTHER; note = 2'-deoxy-2'-fluoroguanosine-3'-phosphorothioate
  modified_base 23: mod_base = OTHER; note = 2'-O-methyladenosine
atggaatactcttggttacatga

SEQ ID NO: 517 - RNA, 23 nt, synthetic construct
  source 1..23: mol_type = other RNA
  modified_base 1: mod_base = OTHER; note = 2'-deoxy-2'-fluoroadenosine-3'-phosphate
  modified_base 2: mod_base = OTHER; note = 2'-deoxy-2'-fluorouridine-3'-phosphate
  modified_base 3: mod_base = OTHER; note = 2'-O-methylguanosine-3'-phosphate
  modified_base 4: mod_base = OTHER; note = 2'-deoxy-2'-fluoroguanosine-3'-phosphate
  modified_base 5: mod_base = OTHER; note = 2'-O-methyladenosine-3'-phosphate
  modified_base 6: mod_base = OTHER; note = 2'-deoxy-2'-fluoroadenosine-3'-phosphate
  modified_base 7: mod_base = OTHER; note = 2'-O-methyluridine-3'-phosphate
  modified_base 8: mod_base = OTHER; note = 2'-deoxy-2'-fluoroadenosine-3'-phosphate
  modified_base 9: mod_base = OTHER; note = 2'-O-methylcytidine-3'-phosphate
  modified_base 10: mod_base = OTHER; note = 2'-O-methyluridine-3'-phosphate
  modified_base 11: mod_base = OTHER; note = 2'-O-methylcytidine-3'-phosphate
  modified_base 12: mod_base = OTHER; note = 2'-deoxy-2'-fluorouridine-3'-phosphate
  modified_base 13: mod_base = OTHER; note = 2'-O-methyluridine-3'-phosphate
  modified_base 14: mod_base = OTHER; note = 2'-deoxy-2'-fluoroguanosine-3'-phosphate
  modified_base 15: mod_base = OTHER; note = 2'-O-methylguanosine-3'-phosphate
  modified_base 16: mod_base = OTHER; note = 2'-deoxy-2'-fluorouridine-3'-phosphate
  modified_base 17: mod_base = OTHER; note = 2'-O-methyluridine-3'-phosphate
  modified_base 18: mod_base = OTHER; note = 2'-deoxy-2'-fluoroadenosine-3'-phosphate
  modified_base 19: mod_base = OTHER; note = 2'-O-methylcytidine-3'-phosphate
  modified_base 20: mod_base = OTHER; note = 2'-deoxy-2'-fluoroadenosine-3'-phosphate
  modified_base 21: mod_base = OTHER; note = 2'-O-methyluridine-3'-phosphorothioate
  modified_base 22: mod_base = OTHER; note = 2'-deoxy-2'-fluoroguanosine-3'-phosphorothioate
  modified_base 23: mod_base = OTHER; note = 2'-O-methyladenosine
atggaatactcttggttacatga

SEQ ID NO: 518 - RNA, 23 nt, synthetic construct
  source 1..23: mol_type = other RNA
  modified_base 1: mod_base = OTHER; note = 2'-O-methyladenosine-3'-phosphate
  modified_base 2: mod_base = OTHER; note = 2'-deoxy-2'-fluorouridine-3'-phosphate
  modified_base 3: mod_base = OTHER; note = 2'-O-methylguanosine-3'-phosphate
  modified_base 4: mod_base = OTHER; note = 2'-deoxy-2'-fluoroguanosine-3'-phosphate
  modified_base 5: mod_base = OTHER; note = 2'-O-methyladenosine-3'-phosphate
  modified_base 6: mod_base = OTHER; note = 2'-deoxy-2'-fluoroadenosine-3'-phosphate
  modified_base 7: mod_base = OTHER; note = 2'-O-methyluridine-3'-phosphate
  modified_base 8: mod_base = OTHER; note = 2'-deoxy-2'-fluoroadenosine-3'-phosphate
  modified_base 9: mod_base = OTHER; note = 2'-O-methylcytidine-3'-phosphate
  modified_base 10: mod_base = OTHER; note = 2'-O-methyluridine-3'-phosphate
  modified_base 11: mod_base = OTHER; note = 2'-O-methylcytidine-3'-phosphate
  modified_base 12: mod_base = OTHER; note = 2'-deoxy-2'-fluorouridine-3'-phosphate
  modified_base 13: mod_base = OTHER; note = 2'-O-methyluridine-3'-phosphate
  modified_base 14: mod_base = OTHER; note = 2'-deoxy-2'-fluoroguanosine-3'-phosphate
  modified_base 15: mod_base = OTHER; note = 2'-O-methylguanosine-3'-phosphate
  modified_base 16: mod_base = OTHER; note = 2'-deoxy-2'-fluorouridine-3'-phosphate
  modified_base 17: mod_base = OTHER; note = 2'-O-methyluridine-3'-phosphate
  modified_base 18: mod_base = OTHER; note = 2'-deoxy-2'-fluoroadenosine-3'-phosphate
  modified_base 19: mod_base = OTHER; note = 2'-O-methylcytidine-3'-phosphate
  modified_base 20: mod_base = OTHER; note = 2'-deoxy-2'-fluoroadenosine-3'-phosphate
  modified_base 21: mod_base = OTHER; note = 2'-deoxy-2'-fluorouridine-3'-phosphorothioate
  modified_base 22: mod_base = OTHER; note = 2'-deoxy-2'-fluoroguanosine-3'-phosphorothioate
  modified_base 23: mod_base = OTHER; note = 2'-O-methyladenosine
atggaatactcttggttacatga

SEQ ID NO: 519 - RNA, 23 nt, synthetic construct
  source 1..23: mol_type = other RNA
  modified_base 1: mod_base = OTHER; note = 2'-O-methyladenosine-3'-phosphate
  modified_base 2: mod_base = OTHER; note = 2'-deoxy-2'-fluorouridine-3'-phosphate
  modified_base 3: mod_base = OTHER; note = 2'-deoxy-2'-fluoroguanosine-3'-phosphate
  modified_base 4: mod_base = OTHER; note = 2'-deoxy-2'-fluoroguanosine-3'-phosphate
  modified_base 5: mod_base = OTHER; note = 2'-O-methyladenosine-3'-phosphate
  modified_base 6: mod_base = OTHER; note = 2'-deoxy-2'-fluoroadenosine-3'-phosphate
  modified_base 7: mod_base = OTHER; note = 2'-O-methyluridine-3'-phosphate
  modified_base 8: mod_base = OTHER; note = 2'-O-methyladenosine-3'-phosphate
  modified_base 9: mod_base = OTHER; note = 2'-O-methylcytidine-3'-phosphate
  modified_base 10: mod_base = OTHER; note = 2'-deoxy-2'-fluorouridine-3'-phosphate
  modified_base 11: mod_base = OTHER; note = 2'-O-methylcytidine-3'-phosphate
  modified_base 12: mod_base = OTHER; note = 2'-deoxy-2'-fluorouridine-3'-phosphate
  modified_base 13: mod_base = OTHER; note = 2'-O-methyluridine-3'-phosphate
  modified_base 14: mod_base = OTHER; note = 2'-deoxy-2'-fluoroguanosine-3'-phosphate
  modified_base 15: mod_base = OTHER; note = 2'-O-methylguanosine-3'-phosphate
  modified_base 16: mod_base = OTHER; note = 2'-deoxy-2'-fluorouridine-3'-phosphate
  modified_base 17: mod_base = OTHER; note = 2'-O-methyluridine-3'-phosphate
  modified_base 18: mod_base = OTHER; note = 2'-deoxy-2'-fluoroadenosine-3'-phosphate
  modified_base 19: mod_base = OTHER; note = 2'-O-methylcytidine-3'-phosphate
  modified_base 20: mod_base = OTHER; note = 2'-deoxy-2'-fluoroadenosine-3'-phosphate
  modified_base 21: mod_base = OTHER; note = 2'-O-methyluridine-3'-phosphorothioate
  modified_base 22: mod_base = OTHER; note = 2'-deoxy-2'-fluoroguanosine-3'-phosphorothioate
  modified_base 23: mod_base = OTHER; note = 2'-O-methyladenosine
atggaatactcttggttacatga

SEQ ID NO: 520 - RNA, 23 nt, synthetic construct
  source 1..23: mol_type = other RNA
  modified_base 1: mod_base = OTHER; note = 2'-O-methyladenosine-3'-phosphate
  modified_base 2: mod_base = OTHER; note = 2'-deoxy-2'-fluorouridine-3'-phosphate
  modified_base 3: mod_base = OTHER; note = 2'-O-methylguanosine-3'-phosphate
  modified_base 4: mod_base = OTHER; note = 2'-deoxy-2'-fluoroguanosine-3'-phosphate
  modified_base 5: mod_base = OTHER; note = 2'-O-methyladenosine-3'-phosphate
  modified_base 6: mod_base = OTHER; note = 2'-deoxy-2'-fluoroadenosine-3'-phosphate
  modified_base 7: mod_base = OTHER; note = 2'-O-methyluridine-3'-phosphate
  modified_base 8: mod_base = OTHER; note = 2'-deoxy-2'-fluoroadenosine-3'-phosphate
  modified_base 9: mod_base = OTHER; note = 2'-O-methylcytidine-3'-phosphate
  modified_base 10: mod_base = OTHER; note = 2'-O-methyluridine-3'-phosphate
  modified_base 11: mod_base = OTHER; note = 2'-O-methylcytidine-3'-phosphate
  modified_base 12: mod_base = OTHER; note = 2'-deoxy-2'-fluorouridine-3'-phosphate
  modified_base 13: mod_base = OTHER; note = 2'-O-methyluridine-3'-phosphate
  modified_base 14: mod_base = OTHER; note = 2'-deoxy-2'-fluoroguanosine-3'-phosphate
  modified_base 15: mod_base = OTHER; note = 2'-O-methylguanosine-3'-phosphate
  modified_base 16: mod_base = OTHER; note = 2'-deoxy-2'-fluorouridine-3'-phosphate
  modified_base 17: mod_base = OTHER; note = 2'-O-methyluridine-3'-phosphate
  modified_base 18: mod_base = OTHER; note = 2'-deoxy-2'-fluoroadenosine-3'-phosphate
  modified_base 19: mod_base = OTHER; note = 2'-O-methylcytidine-3'-phosphate
  modified_base 20: mod_base = OTHER; note = 2'-deoxy-2'-fluoroadenosine-3'-phosphate
  modified_base 21: mod_base = OTHER; note = 2'-O-methyluridine-3'-phosphorothioate
  modified_base 22: mod_base = OTHER; note = 2'-deoxy-2'-fluoroguanosine-3'-phosphorothioate
  modified_base 23: mod_base = OTHER; note = 2'-O-methyladenosine
atggaatactcttggttacatga

SEQ ID NO: 521 - RNA, 23 nt, synthetic construct
  source 1..23: mol_type = other RNA
  modified_base 1: mod_base = OTHER; note = 2'-O-methyladenosine-3'-phosphate
  modified_base 2: mod_base = OTHER; note = 2'-deoxy-2'-fluorouridine-3'-phosphate
  modified_base 3: mod_base = OTHER; note = 2'-O-methylguanosine-3'-phosphate
  modified_base 4: mod_base = OTHER; note = 2'-deoxy-2'-fluoroguanosine-3'-phosphate
  modified_base 5: mod_base = OTHER; note = 2'-deoxy-2'-fluoroadenosine-3'-phosphate
  modified_base 6: mod_base = OTHER; note = 2'-deoxy-2'-fluoroadenosine-3'-phosphate
  modified_base 7: mod_base = OTHER; note = 2'-O-methyluridine-3'-phosphate
  modified_base 8: mod_base = OTHER; note = 2'-O-methyladenosine-3'-phosphate
  modified_base 9: mod_base = OTHER; note = 2'-O-methylcytidine-3'-phosphate
  modified_base 10: mod_base = OTHER; note = 2'-deoxy-2'-fluorouridine-3'-phosphate
  modified_base 11: mod_base = OTHER; note = 2'-O-methylcytidine-3'-phosphate
  modified_base 12: mod_base = OTHER; note = 2'-deoxy-2'-fluorouridine-3'-phosphate
  modified_base 13: mod_base = OTHER; note = 2'-O-methyluridine-3'-phosphate
  modified_base 14: mod_base = OTHER; note = 2'-deoxy-2'-fluoroguanosine-3'-phosphate
  modified_base 15: mod_base = OTHER; note = 2'-O-methylguanosine-3'-phosphate
  modified_base 16: mod_base = OTHER; note = 2'-deoxy-2'-fluorouridine-3'-phosphate
  modified_base 17: mod_base = OTHER; note = 2'-O-methyluridine-3'-phosphate
  modified_base 18: mod_base = OTHER; note = 2'-deoxy-2'-fluoroadenosine-3'-phosphate
  modified_base 19: mod_base = OTHER; note = 2'-O-methylcytidine-3'-phosphate
  modified_base 20: mod_base = OTHER; note = 2'-deoxy-2'-fluoroadenosine-3'-phosphate
  modified_base 21: mod_base = OTHER; note = 2'-O-methyluridine-3'-phosphorothioate
  modified_base 22: mod_base = OTHER; note = 2'-deoxy-2'-fluoroguanosine-3'-phosphorothioate
  modified_base 23: mod_base = OTHER; note = 2'-O-methyladenosine
atggaatactcttggttacatga

SEQ ID NO: 522 - RNA, 23 nt, synthetic construct
  source 1..23: mol_type = other RNA
  modified_base 1: mod_base = OTHER; note = 2'-O-methyladenosine-3'-phosphate
  modified_base 2: mod_base = OTHER; note = 2'-deoxy-2'-fluorouridine-3'-phosphate
  modified_base 3: mod_base = OTHER; note = 2'-O-methylguanosine-3'-phosphate
  modified_base 4: mod_base = OTHER; note = 2'-deoxy-2'-fluoroguanosine-3'-phosphate
  modified_base 5: mod_base = OTHER; note = 2'-deoxy-2'-fluoroadenosine-3'-phosphate
  modified_base 6: mod_base = OTHER; note = 2'-deoxy-2'-fluoroadenosine-3'-phosphate
  modified_base 7: mod_base = OTHER; note = 2'-O-methyluridine-3'-phosphate
  modified_base 8: mod_base = OTHER; note = 2'-deoxy-2'-fluoroadenosine-3'-phosphate
  modified_base 9: mod_base = OTHER; note = 2'-O-methylcytidine-3'-phosphate
  modified_base 10: mod_base = OTHER; note = 2'-deoxy-2'-fluorouridine-3'-phosphate
  modified_base 11: mod_base = OTHER; note = 2'-O-methylcytidine-3'-phosphate
  modified_base 12: mod_base = OTHER; note = 2'-deoxy-2'-fluorouridine-3'-phosphate
  modified_base 13: mod_base = OTHER; note = 2'-O-methyluridine-3'-phosphate
  modified_base 14: mod_base = OTHER; note = 2'-deoxy-2'-fluoroguanosine-3'-phosphate
  modified_base 15: mod_base = OTHER; note = 2'-O-methylguanosine-3'-phosphate
  modified_base 16: mod_base = OTHER; note = 2'-deoxy-2'-fluorouridine-3'-phosphate
  modified_base 17: mod_base = OTHER; note = 2'-O-methyluridine-3'-phosphate
  modified_base 18: mod_base = OTHER; note = 2'-O-methyladenosine-3'-phosphate
  modified_base 19: mod_base = OTHER; note = 2'-O-methylcytidine-3'-phosphate
  modified_base 20: mod_base = OTHER; note = 2'-deoxy-2'-fluoroadenosine-3'-phosphate
  modified_base 21: mod_base = OTHER; note = 2'-O-methyluridine-3'-phosphorothioate
  modified_base 22: mod_base = OTHER; note = 2'-deoxy-2'-fluoroguanosine-3'-phosphorothioate
  modified_base 23: mod_base = OTHER; note = 2'-O-methyladenosine
atggaatactcttggttacatga

SEQ ID NO: 523 - RNA, 23 nt, synthetic construct
  source 1..23: mol_type = other RNA
  modified_base 1: mod_base = OTHER; note = 2'-O-methyladenosine-3'-phosphate
  modified_base 2: mod_base = OTHER; note = 2'-deoxy-2'-fluorouridine-3'-phosphate
  modified_base 3: mod_base = OTHER; note = 2'-deoxy-2'-fluoroguanosine-3'-phosphate
  modified_base 4: mod_base = OTHER; note = 2'-deoxy-2'-fluoroguanosine-3'-phosphate
  modified_base 5: mod_base = OTHER; note = 2'-O-methyladenosine-3'-phosphate
  modified_base 6: mod_base = OTHER; note = 2'-O-methyladenosine-3'-phosphate
  modified_base 7: mod_base = OTHER; note = 2'-O-methyluridine-3'-phosphate
  modified_base 8: mod_base = OTHER; note = 2'-deoxy-2'-fluoroadenosine-3'-phosphate
  modified_base 9: mod_base = OTHER; note = 2'-O-methylcytidine-3'-phosphate
  modified_base 10: mod_base = OTHER; note = 2'-deoxy-2'-fluorouridine-3'-phosphate
  modified_base 11: mod_base = OTHER; note = 2'-O-methylcytidine-3'-phosphate
  modified_base 12: mod_base = OTHER; note = 2'-deoxy-2'-fluorouridine-3'-phosphate
  modified_base 13: mod_base = OTHER; note = 2'-O-methyluridine-3'-phosphate
  modified_base 14: mod_base = OTHER; note = 2'-deoxy-2'-fluoroguanosine-3'-phosphate
  modified_base 15: mod_base = OTHER; note = 2'-O-methylguanosine-3'-phosphate
  modified_base 16: mod_base = OTHER; note = 2'-deoxy-2'-fluorouridine-3'-phosphate
  modified_base 17: mod_base = OTHER; note = 2'-O-methyluridine-3'-phosphate
  modified_base 18: mod_base = OTHER; note = 2'-deoxy-2'-fluoroadenosine-3'-phosphate
  modified_base 19: mod_base = OTHER; note = 2'-O-methylcytidine-3'-phosphate
  modified_base 20: mod_base = OTHER; note = 2'-deoxy-2'-fluoroadenosine-3'-phosphate
  modified_base 21: mod_base = OTHER; note = 2'-O-methyluridine-3'-phosphorothioate
  modified_base 22: mod_base = OTHER; note = 2'-deoxy-2'-fluoroguanosine-3'-phosphorothioate
  modified_base 23: mod_base = OTHER; note = 2'-O-methyladenosine
atggaatactcttggttacatga

SEQ ID NO: 524 - DNA, 23 bp, synthetic construct
  source 1..23: mol_type = other DNA
  modified_base 2: mod_base = OTHER; note = uridine-3'-phosphate
  modified_base 4: mod_base = OTHER; note = guanosine-3'-phosphate
  modified_base 6: mod_base = OTHER; note = 2'-O-methyladenosine-3'-phosphate
  modified_base 8: mod_base = OTHER; note = 2'-deoxy-2'-fluoroadenosine-3'-phosphate
  modified_base 10: mod_base = OTHER; note = 2'-deoxy-2'-fluorouridine-3'-phosphate
  modified_base 11: mod_base = OTHER; note = 2'-O-methylcytidine-3'-phosphate
  modified_base 12: mod_base = OTHER; note = 2'-deoxy-2'-fluorouridine-3'-phosphate
  modified_base 13: mod_base = OTHER; note = 2'-O-methyluridine-3'-phosphate
  modified_base 14: mod_base = OTHER; note = 2'-deoxy-2'-fluoroguanosine-3'-phosphate
  modified_base 15: mod_base = OTHER; note = 2'-O-methylguanosine-3'-phosphate
  modified_base 16: mod_base = OTHER; note = 2'-deoxy-2'-fluorouridine-3'-phosphate
  modified_base 17: mod_base = OTHER; note = 2'-O-methyluridine-3'-phosphate
  modified_base 18: mod_base = OTHER; note = 2'-deoxy-2'-fluoroadenosine-3'-phosphate
  modified_base 19: mod_base = OTHER; note = 2'-O-methylcytidine-3'-phosphate
  modified_base 20: mod_base = OTHER; note = 2'-deoxy-2'-fluoroadenosine-3'-phosphate
  modified_base 21: mod_base = OTHER; note = 2'-O-methyluridine-3'-phosphorothioate
  modified_base 22: mod_base = OTHER; note = 2'-deoxy-2'-fluoroguanosine-3'-phosphorothioate
  modified_base 23: mod_base = OTHER; note = 2'-O-methyladenosine
  misc_feature 2: note = RNA
  misc_feature 4: note = RNA
  misc_feature 6: note = RNA
  misc_feature 8: note = RNA
  misc_feature 10..23: note = RNA
  misc_feature 1: note = DNA
  misc_feature 5: note = DNA
  misc_feature 7: note = DNA
  misc_feature 9: note = DNA
atggaatactcttggttacatga

SEQ ID NO: 525 - RNA, 23 nt, synthetic construct
  source 1..23: mol_type = other RNA
  modified_base 1: mod_base = OTHER; note = 2'-O-methyladenosine-3'-phosphate
  modified_base 2: mod_base = OTHER; note = 2'-deoxy-2'-fluorouridine-3'-phosphate
  modified_base 3: mod_base = OTHER; note = 2'-O-methylguanosine-3'-phosphate
  modified_base 4: mod_base = OTHER; note = 2'-deoxy-2'-fluoroguanosine-3'-phosphate
  modified_base 5: mod_base = OTHER; note = 2'-O-methyladenosine-3'-phosphate
  modified_base 6: mod_base = OTHER; note = 2'-deoxy-2'-fluoroadenosine-3'-phosphate
  modified_base 7: mod_base = OTHER; note = 2'-O-methyluridine-3'-phosphate
  modified_base 8: mod_base = OTHER; note = 2'-deoxy-2'-fluoroadenosine-3'-phosphate
  modified_base 9: mod_base = OTHER; note = 2'-O-methylcytidine-3'-phosphate
  modified_base 10: mod_base = OTHER; note = 2'-deoxy-2'-fluorouridine-3'-phosphate
  modified_base 11: mod_base = OTHER; note = 2'-O-methylcytidine-3'-phosphate
  modified_base 12: mod_base = OTHER; note = 2'-deoxy-2'-fluorouridine-3'-phosphate
  modified_base 13: mod_base = OTHER; note = 2'-O-methyluridine-3'-phosphate
  modified_base 14: mod_base = OTHER; note = 2'-deoxy-2'-fluoroguanosine-3'-phosphate
  modified_base 15: mod_base = OTHER; note = 2'-O-methylguanosine-3'-phosphate
  modified_base 16: mod_base = OTHER; note = 2'-deoxy-2'-fluorouridine-3'-phosphate
  modified_base 17: mod_base = OTHER; note = 2'-O-methyluridine-3'-phosphate
  modified_base 18: mod_base = OTHER; note = 2'-deoxy-2'-fluoroadenosine-3'-phosphate
  modified_base 19: mod_base = OTHER; note = 2'-O-methylcytidine-3'-phosphate
  modified_base 20: mod_base = OTHER; note = 2'-deoxy-2'-fluoroadenosine-3'-phosphate
  modified_base 21: mod_base = OTHER; note = 2'-O-methyluridine-3'-phosphorothioate
  modified_base 22: mod_base = OTHER; note = 2'-deoxy-2'-fluoroguanosine-3'-phosphorothioate
  modified_base 23: mod_base = OTHER; note = 2'-O-methyladenosine
atggaatactcttggttacatga

SEQ ID NO: 526 - RNA, 23 nt, synthetic construct
  source 1..23: mol_type = other RNA
  modified_base 1: mod_base = OTHER; note = 2'-O-methyladenosine-3'-phosphate
  modified_base 2: mod_base = OTHER; note = 2'-deoxy-2'-fluorouridine-3'-phosphate
  modified_base 3: mod_base = OTHER; note = 2'-deoxy-2'-fluoroguanosine-3'-phosphate
  modified_base 4: mod_base = OTHER; note = 2'-deoxy-2'-fluoroguanosine-3'-phosphate
  modified_base 5: mod_base = OTHER; note = 2'-O-methyladenosine-3'-phosphate
  modified_base 6: mod_base = OTHER; note = 2'-deoxy-2'-fluoroadenosine-3'-phosphate
  modified_base 7: mod_base = OTHER; note = 2'-O-methyluridine-3'-phosphate
  modified_base 8: mod_base = OTHER; note = 2'-deoxy-2'-fluoroadenosine-3'-phosphate
  modified_base 9: mod_base = OTHER; note = 2'-O-methylcytidine-3'-phosphate
  modified_base 10: mod_base = OTHER; note = 2'-O-methyluridine-3'-phosphate
  modified_base 11: mod_base = OTHER; note = 2'-O-methylcytidine-3'-phosphate
  modified_base 12: mod_base = OTHER; note = 2'-deoxy-2'-fluorouridine-3'-phosphate
  modified_base 13: mod_base = OTHER; note = 2'-O-methyluridine-3'-phosphate
  modified_base 14: mod_base = OTHER; note = 2'-deoxy-2'-fluoroguanosine-3'-phosphate
  modified_base 15: mod_base = OTHER; note = 2'-O-methylguanosine-3'-phosphate
  modified_base 16: mod_base = OTHER; note = 2'-deoxy-2'-fluorouridine-3'-phosphate
  modified_base 17: mod_base = OTHER; note = 2'-O-methyluridine-3'-phosphate
  modified_base 18: mod_base = OTHER; note = 2'-deoxy-2'-fluoroadenosine-3'-phosphate
  modified_base 19: mod_base = OTHER; note = 2'-O-methylcytidine-3'-phosphate
  modified_base 20: mod_base = OTHER; note = 2'-deoxy-2'-fluoroadenosine-3'-phosphate
  modified_base 21: mod_base = OTHER; note = 2'-O-methyluridine-3'-phosphorothioate
  modified_base 22: mod_base = OTHER; note = 2'-deoxy-2'-fluoroguanosine-3'-phosphorothioate
  modified_base 23: mod_base = OTHER; note = 2'-O-methyladenosine
atggaatactcttggttacatga

SEQ ID NO: 527 - DNA, 23 bp, synthetic construct
  source 1..23: mol_type = other DNA
  modified_base 1: mod_base = OTHER; note = 2'-O-methyladenosine-3'-phosphate
  modified_base 2: mod_base = OTHER; note = 2'-deoxy-2'-fluorouridine-3'-phosphate
  modified_base 3: mod_base = OTHER; note = 2'-O-methylguanosine-3'-phosphate
  modified_base 4: mod_base = OTHER; note = 2'-deoxy-2'-fluoroguanosine-3'-phosphate
  modified_base 5: mod_base = OTHER; note = 2'-O-methyladenosine-3'-phosphate
  modified_base 6: mod_base = OTHER; note = 2'-deoxy-2'-fluoroadenosine-3'-phosphate
  modified_base 7: mod_base = OTHER; note = 2'-O-methyluridine-3'-phosphate
  modified_base 8: mod_base = OTHER; note = 2'-deoxy-2'-fluoroadenosine-3'-phosphate
  modified_base 10: mod_base = OTHER; note = 2'-O-methyluridine-3'-phosphate
  modified_base 11: mod_base = OTHER; note = 2'-deoxy-2'-fluorocytidine-3'-phosphate
  modified_base 13: mod_base = OTHER; note = 2'-O-methyluridine-3'-phosphate
  modified_base 14: mod_base = OTHER; note = 2'-deoxy-2'-fluoroguanosine-3'-phosphate
  modified_base 16: mod_base = OTHER; note = 2'-O-methyluridine-3'-phosphate
  modified_base 17: mod_base = OTHER; note = 2'-deoxy-2'-fluorouridine-3'-phosphate
  modified_base 18: mod_base = OTHER; note = 2'-O-methyladenosine-3'-phosphate
  modified_base 19: mod_base = OTHER; note = 2'-O-methylcytidine-3'-phosphate
  modified_base 20: mod_base = OTHER; note = 2'-deoxy-2'-fluoroadenosine-3'-phosphate
  modified_base 21: mod_base = OTHER; note = 2'-O-methyluridine-3'-phosphorothioate
  modified_base 22: mod_base = OTHER; note = 2'-deoxy-2'-fluoroguanosine-3'-phosphorothioate
  modified_base 23: mod_base = OTHER; note = 2'-O-methyladenosine
  misc_feature 1..8: note = RNA
  misc_feature 10..11: note = RNA
  misc_feature 13..14: note = RNA
  misc_feature 16..23: note = RNA
  misc_feature 9: note = DNA
  misc_feature 12: note = DNA
  misc_feature 15: note = DNA
atggaatactcttggttacatga

SEQ ID NO: 528 - RNA, 23 nt, synthetic construct
  source 1..23: mol_type = other RNA
  modified_base 1: mod_base = OTHER; note = 2'-O-methyladenosine-3'-phosphate
  modified_base 2: mod_base = OTHER; note = 2'-deoxy-2'-fluorouridine-3'-phosphate
  modified_base 3: mod_base = OTHER; note = 2'-O-methylguanosine-3'-phosphate
  modified_base 4: mod_base = OTHER; note = 2'-deoxy-2'-fluoroguanosine-3'-phosphate
  modified_base 5: mod_base = OTHER; note = 2'-O-methyladenosine-3'-phosphate
  modified_base 6: mod_base = OTHER; note = 2'-deoxy-2'-fluoroadenosine-3'-phosphate
  modified_base 7: mod_base = OTHER; note = 2'-O-methyluridine-3'-phosphate
  modified_base 8: mod_base = OTHER; note = 2'-deoxy-2'-fluoroadenosine-3'-phosphate
  modified_base 9: mod_base = OTHER; note = 2'-O-methylcytidine-3'-phosphate
  modified_base 10: mod_base = OTHER; note = 2'-deoxy-2'-fluorouridine-3'-phosphate
  modified_base 11: mod_base = OTHER; note = 2'-O-methylcytidine-3'-phosphate
  modified_base 12: mod_base = OTHER; note = 2'-deoxy-2'-fluorouridine-3'-phosphate
  modified_base 13: mod_base = OTHER; note = 2'-O-methyluridine-3'-phosphate
  modified_base 14: mod_base = OTHER; note = 2'-O-methylguanosine-3'-phosphate
  modified_base 15: mod_base = OTHER; note = 2'-O-methylguanosine-3'-phosphate
  modified_base 16: mod_base = OTHER; note = 2'-deoxy-2'-fluorouridine-3'-phosphate
  modified_base 17: mod_base = OTHER; note = 2'-deoxy-2'-fluorouridine-3'-phosphate
  modified_base 18: mod_base = OTHER; note = 2'-deoxy-2'-fluoroadenosine-3'-phosphate
  modified_base 19: mod_base = OTHER; note = 2'-O-methylcytidine-3'-phosphate
  modified_base 20: mod_base = OTHER; note = 2'-deoxy-2'-fluoroadenosine-3'-phosphate
  modified_base 21: mod_base = OTHER; note = 2'-O-methyluridine-3'-phosphorothioate
  modified_base 22: mod_base = OTHER; note = 2'-deoxy-2'-fluoroguanosine-3'-phosphorothioate
  modified_base 23: mod_base = OTHER; note = 2'-O-methyladenosine
atggaatactcttggttacatga

SEQ ID NO: 529 - RNA, 23 nt, synthetic construct
  source 1..23: mol_type = other RNA
  modified_base 1: mod_base = OTHER; note = 2'-O-methyladenosine-3'-phosphate
  modified_base 2: mod_base = OTHER; note = 2'-deoxy-2'-fluorouridine-3'-phosphate
  modified_base 3: mod_base = OTHER; note = 2'-O-methylguanosine-3'-phosphate
  modified_base 4: mod_base = OTHER; note = 2'-deoxy-2'-fluoroguanosine-3'-phosphate
  modified_base 5: mod_base = OTHER; note = 2'-O-methyladenosine-3'-phosphate
  modified_base 6: mod_base = OTHER; note = 2'-deoxy-2'-fluoroadenosine-3'-phosphate
  modified_base 7: mod_base = OTHER; note = 2'-O-methyluridine-3'-phosphate
  modified_base 8: mod_base = OTHER; note = 2'-O-methyladenosine-3'-phosphate
  modified_base 9: mod_base = OTHER; note = 2'-O-methylcytidine-3'-phosphate
  modified_base 10: mod_base = OTHER; note = 2'-deoxy-2'-fluorouridine-3'-phosphate
  modified_base 11: mod_base = OTHER; note = 2'-O-methylcytidine-3'-phosphate
  modified_base 12: mod_base = OTHER; note = 2'-deoxy-2'-fluorouridine-3'-phosphate
  modified_base 13: mod_base = OTHER; note = 2'-O-methyluridine-3'-phosphate
  modified_base 14: mod_base = OTHER; note = 2'-deoxy-2'-fluoroguanosine-3'-phosphate
  modified_base 15: mod_base = OTHER; note = 2'-deoxy-2'-fluoroguanosine-3'-phosphate
  modified_base 16: mod_base = OTHER; note = 2'-deoxy-2'-fluorouridine-3'-phosphate
  modified_base 17: mod_base = OTHER; note = 2'-O-methyluridine-3'-phosphate
  modified_base 18: mod_base = OTHER; note = 2'-deoxy-2'-fluoroadenosine-3'-phosphate
  modified_base 19: mod_base = OTHER; note = 2'-O-methylcytidine-3'-phosphate
  modified_base 20: mod_base = OTHER; note = 2'-deoxy-2'-fluoroadenosine-3'-phosphate
  modified_base 21: mod_base = OTHER; note = 2'-O-methyluridine-3'-phosphorothioate
  modified_base 22: mod_base = OTHER; note = 2'-deoxy-2'-fluoroguanosine-3'-phosphorothioate
  modified_base 23: mod_base = OTHER; note = 2'-O-methyladenosine
atggaatactcttggttacatga

SEQ ID NO: 530 - RNA, 23 nt, synthetic construct
  source 1..23: mol_type = other RNA
  modified_base 1: mod_base = OTHER; note = 2'-O-methyladenosine-3'-phosphate
  modified_base 2: mod_base = OTHER; note = 2'-deoxy-2'-fluorouridine-3'-phosphate
  modified_base 3: mod_base = OTHER; note = 2'-O-methylguanosine-3'-phosphate
  modified_base 4: mod_base = OTHER; note = 2'-deoxy-2'-fluoroguanosine-3'-phosphate
  modified_base 5: mod_base = OTHER; note = 2'-deoxy-2'-fluoroadenosine-3'-phosphate
  modified_base 6: mod_base = OTHER; note = 2'-deoxy-2'-fluoroadenosine-3'-phosphate
  modified_base 7: mod_base = OTHER; note = 2'-O-methyluridine-3'-phosphate
  modified_base 8: mod_base = OTHER; note = 2'-deoxy-2'-fluoroadenosine-3'-phosphate
  modified_base 9: mod_base = OTHER; note = 2'-O-methylcytidine-3'-phosphate
  modified_base 10: mod_base = OTHER; note = 2'-deoxy-2'-fluorouridine-3'-phosphate
  modified_base 11: mod_base = OTHER; note = 2'-O-methylcytidine-3'-phosphate
  modified_base 12: mod_base = OTHER; note = 2'-deoxy-2'-fluorouridine-3'-phosphate
  modified_base 13: mod_base = OTHER; note = 2'-O-methyluridine-3'-phosphate
  modified_base 14: mod_base = OTHER; note = 2'-deoxy-2'-fluoroguanosine-3'-phosphate
  modified_base 15: mod_base = OTHER; note = 2'-O-methylguanosine-3'-phosphate
  modified_base 16: mod_base = OTHER; note = 2'-deoxy-2'-fluorouridine-3'-phosphate
  modified_base 17: mod_base = OTHER; note = 2'-O-methyluridine-3'-phosphate
  modified_base 18: mod_base = OTHER; note = 2'-deoxy-2'-fluoroadenosine-3'-phosphate
  modified_base 19: mod_base = OTHER; note = 2'-O-methylcytidine-3'-phosphate
  modified_base 20: mod_base = OTHER; note = 2'-deoxy-2'-fluoroadenosine-3'-phosphate
  modified_base 21: mod_base = OTHER; note = 2'-O-methyluridine-3'-phosphorothioate
  modified_base 22: mod_base = OTHER; note = 2'-deoxy-2'-fluoroguanosine-3'-phosphorothioate
  modified_base 23: mod_base = OTHER; note = 2'-O-methyladenosine
atggaatactcttggttacatga

SEQ ID NO: 531 - RNA, 23 nt, synthetic construct
  source 1..23: mol_type = other RNA
  modified_base 1: mod_base = OTHER; note = 2'-O-methyladenosine-3'-phosphate
  modified_base 2: mod_base = OTHER; note = 2'-deoxy-2'-fluorouridine-3'-phosphate
  modified_base 3: mod_base = OTHER; note = 2'-O-methylguanosine-3'-phosphate
  modified_base 4: mod_base = OTHER; note = 2'-deoxy-2'-fluoroguanosine-3'-phosphate
  modified_base 5: mod_base = OTHER; note = 2'-O-methyladenosine-3'-phosphate
  modified_base 6: mod_base = OTHER; note = 2'-deoxy-2'-fluoroadenosine-3'-phosphate
  modified_base 7: mod_base = OTHER; note = 2'-O-methyluridine-3'-phosphate
  modified_base 8: mod_base = OTHER; note = 2'-deoxy-2'-fluoroadenosine-3'-phosphate
  modified_base 9: mod_base = OTHER; note = 2'-O-methylcytidine-3'-phosphate
  modified_base 10: mod_base = OTHER; note = 2'-O-methyluridine-3'-phosphate
  modified_base 11: mod_base = OTHER; note = 2'-O-methylcytidine-3'-phosphate
  modified_base 12: mod_base = OTHER; note = 2'-deoxy-2'-fluorouridine-3'-phosphate
  modified_base 13: mod_base = OTHER; note = 2'-O-methyluridine-3'-phosphate
  modified_base 14: mod_base = OTHER; note = 2'-deoxy-2'-fluoroguanosine-3'-phosphate
  modified_base 15: mod_base = OTHER; note = 2'-O-methylguanosine-3'-phosphate
  modified_base 16: mod_base = OTHER; note = 2'-deoxy-2'-fluorouridine-3'-phosphate
  modified_base 17: mod_base = OTHER; note = 2'-deoxy-2'-fluorouridine-3'-phosphate
  modified_base 18: mod_base = OTHER; note = 2'-deoxy-2'-fluoroadenosine-3'-phosphate
  modified_base 19: mod_base = OTHER; note = 2'-O-methylcytidine-3'-phosphate
  modified_base 20: mod_base = OTHER; note = 2'-deoxy-2'-fluoroadenosine-3'-phosphate
  modified_base 21: mod_base = OTHER; note = 2'-O-methyluridine-3'-phosphorothioate
  modified_base 22: mod_base = OTHER; note = 2'-deoxy-2'-fluoroguanosine-3'-phosphorothioate
  modified_base 23: mod_base = OTHER; note = 2'-O-methyladenosine
atggaatactcttggttacatga

SEQ ID NO: 532 - RNA, 23 nt, synthetic construct
  source 1..23: mol_type = other RNA
  modified_base 1: mod_base = OTHER; note = 2'-O-methyladenosine-3'-phosphate
  modified_base 2: mod_base = OTHER; note = 2'-deoxy-2'-fluorouridine-3'-phosphate
  modified_base 3: mod_base = OTHER; note = 2'-O-methylguanosine-3'-phosphate
  modified_base 4: mod_base = OTHER; note = 2'-deoxy-2'-fluoroguanosine-3'-phosphate
  modified_base 5: mod_base = OTHER; note = 2'-O-methyladenosine-3'-phosphate
  modified_base 6: mod_base = OTHER; note = 2'-deoxy-2'-fluoroadenosine-3'-phosphate
  modified_base 7: mod_base = OTHER; note = 2'-O-methyluridine-3'-phosphate
  modified_base 8: mod_base = OTHER; note = 2'-deoxy-2'-fluoroadenosine-3'-phosphate
  modified_base 9: mod_base = OTHER; note = 2'-O-methylcytidine-3'-phosphate
  modified_base 10: mod_base = OTHER; note = 2'-O-methyluridine-3'-phosphate
  modified_base 11: mod_base = OTHER; note = 2'-O-methylcytidine-3'-phosphate
  modified_base 12: mod_base = OTHER; note = 2'-deoxy-2'-fluorouridine-3'-phosphate
  modified_base 13: mod_base = OTHER; note = 2'-O-methyluridine-3'-phosphate
  modified_base 14: mod_base = OTHER; note = 2'-deoxy-2'-fluoroguanosine-3'-phosphate
  modified_base 15: mod_base = OTHER; note = 2'-deoxy-2'-fluoroguanosine-3'-phosphate
  modified_base 16: mod_base = OTHER; note = 2'-deoxy-2'-fluorouridine-3'-phosphate
  modified_base 17: mod_base = OTHER; note = 2'-O-methyluridine-3'-phosphate
  modified_base 18: mod_base = OTHER; note = 2'-deoxy-2'-fluoroadenosine-3'-phosphate
  modified_base 19: mod_base = OTHER; note = 2'-O-methylcytidine-3'-phosphate
  modified_base 20: mod_base = OTHER; note = 2'-deoxy-2'-fluoroadenosine-3'-phosphate
  modified_base 21: mod_base = OTHER; note = 2'-O-methyluridine-3'-phosphorothioate
  modified_base 22: mod_base = OTHER; note = 2'-deoxy-2'-fluoroguanosine-3'-phosphorothioate
  modified_base 23: mod_base = OTHER; note = 2'-O-methyladenosine
atggaatactcttggttacatga

SEQ ID NO: 533 - RNA, 23 nt, synthetic construct
  source 1..23: mol_type = other RNA
  modified_base 1: mod_base = OTHER; note = 2'-O-methyladenosine-3'-phosphate
  modified_base 2: mod_base = OTHER; note = 2'-deoxy-2'-fluorouridine-3'-phosphate
  modified_base 3: mod_base = OTHER; note = 2'-O-methylguanosine-3'-phosphate
  modified_base 4: mod_base = OTHER; note = 2'-deoxy-2'-fluoroguanosine-3'-phosphate
  modified_base 5: mod_base = OTHER; note = 2'-O-methyladenosine-3'-phosphate
  modified_base 6: mod_base = OTHER; note = 2'-deoxy-2'-fluoroadenosine-3'-phosphate
  modified_base 7: mod_base = OTHER; note = 2'-O-methyluridine-3'-phosphate
  modified_base 8: mod_base = OTHER; note = 2'-deoxy-2'-fluoroadenosine-3'-phosphate
  modified_base 9: mod_base = OTHER; note = 2'-O-methylcytidine-3'-phosphate
  modified_base 10: mod_base = OTHER; note = 2'-deoxy-2'-fluorouridine-3'-phosphate
  modified_base 11: mod_base = OTHER; note = 2'-O-methylcytidine-3'-phosphate
  modified_base 12: mod_base = OTHER; note = 2'-deoxy-2'-fluorouridine-3'-phosphate
  modified_base 13: mod_base = OTHER; note = 2'-O-methyluridine-3'-phosphate
  modified_base 14: mod_base = OTHER; note = 2'-deoxy-2'-fluoroguanosine-3'-phosphate
  modified_base 15: mod_base = OTHER; note = 2'-O-methylguanosine-3'-phosphate
  modified_base 16: mod_base = OTHER; note = 2'-deoxy-2'-fluorouridine-3'-phosphate
  modified_base 17: mod_base = OTHER; note = 2'-O-methyluridine-3'-phosphate
  modified_base 18: mod_base = OTHER; note = 2'-deoxy-2'-fluoroadenosine-3'-phosphate
  modified_base 19: mod_base = OTHER; note = 2'-O-methylcytidine-3'-phosphate
  modified_base 20: mod_base = OTHER; note = 2'-deoxy-2'-fluoroadenosine-3'-phosphate
  modified_base 21: mod_base = OTHER; note = 2'-O-methyluridine-3'-phosphorothioate
  modified_base 22: mod_base = OTHER; note = 2'-deoxy-2'-fluoroguanosine-3'-phosphorothioate
  modified_base 23: mod_base = OTHER; note = 2'-O-methyladenosine
atggaatactcttggttacatga

SEQ ID NO: 534 - RNA, 23 nt, synthetic construct
  source 1..23: mol_type = other RNA
  modified_base 1: mod_base = OTHER; note = 2'-O-methyladenosine-3'-phosphate
  modified_base 2: mod_base = OTHER; note = 2'-deoxy-2'-fluorouridine-3'-phosphate
  modified_base 3: mod_base = OTHER; note = 2'-deoxy-2'-fluoroguanosine-3'-phosphate
  modified_base 4: mod_base = OTHER; note = 2'-deoxy-2'-fluoroguanosine-3'-phosphate
  modified_base 5: mod_base = OTHER; note = 2'-O-methyladenosine-3'-phosphate
  modified_base 6: mod_base = OTHER; note = 2'-deoxy-2'-fluoroadenosine-3'-phosphate
  modified_base 7: mod_base = OTHER; note = 2'-O-methyluridine-3'-phosphate
  modified_base 8: mod_base = OTHER; note = 2'-deoxy-2'-fluoroadenosine-3'-phosphate
  modified_base 9: mod_base = OTHER; note = 2'-O-methylcytidine-3'-phosphate
  modified_base 10: mod_base = OTHER; note = 2'-deoxy-2'-fluorouridine-3'-phosphate
  modified_base 11: mod_base = OTHER; note = 2'-O-methylcytidine-3'-phosphate
  modified_base 12: mod_base = OTHER; note = 2'-deoxy-2'-fluorouridine-3'-phosphate
  modified_base 13: mod_base = OTHER; note = 2'-O-methyluridine-3'-phosphate
  modified_base 14: mod_base = OTHER; note = 2'-deoxy-2'-fluoroguanosine-3'-phosphate
  modified_base 15: mod_base = OTHER; note = 2'-O-methylguanosine-3'-phosphate
  modified_base 16: mod_base = OTHER; note = 2'-deoxy-2'-fluorouridine-3'-phosphate
  modified_base 17: mod_base = OTHER; note = 2'-O-methyluridine-3'-phosphate
  modified_base 18: mod_base = OTHER; note = 2'-O-methyladenosine-3'-phosphate
  modified_base 19: mod_base = OTHER; note = 2'-O-methylcytidine-3'-phosphate
  modified_base 20: mod_base = OTHER; note = 2'-deoxy-2'-fluoroadenosine-3'-phosphate
  modified_base 21: mod_base = OTHER; note = 2'-O-methyluridine-3'-phosphorothioate
  modified_base 22: mod_base = OTHER; note = 2'-deoxy-2'-fluoroguanosine-3'-phosphorothioate
  modified_base 23: mod_base = OTHER; note = 2'-O-methyladenosine
atggaatactcttggttacatga

SEQ ID NO: 535 - RNA, 23 nt, synthetic construct
  source 1..23: mol_type = other RNA
  modified_base 1: mod_base = OTHER; note = 2'-O-methyladenosine-3'-phosphate
  modified_base 2: mod_base = OTHER; note = 2'-deoxy-2'-fluorouridine-3'-phosphate
  modified_base 3: mod_base = OTHER; note = 2'-O-methylguanosine-3'-phosphate
  modified_base 4: mod_base = OTHER; note = 2'-deoxy-2'-fluoroguanosine-3'-phosphate
  modified_base 5: mod_base = OTHER; note = 2'-O-methyladenosine-3'-phosphate
  modified_base 6: mod_base = OTHER; note = 2'-O-methyladenosine-3'-phosphate
  modified_base 7: mod_base = OTHER; note = 2'-O-methyluridine-3'-phosphate
  modified_base 8: mod_base = OTHER; note = 2'-deoxy-2'-fluoroadenosine-3'-phosphate
  modified_base 9: mod_base = OTHER; note = 2'-deoxy-2'-fluorocytidine-3'-phosphate
  modified_base 10: mod_base = OTHER; note = 2'-deoxy-2'-fluorouridine-3'-phosphate
  modified_base 11: mod_base = OTHER; note = 2'-O-methylcytidine-3'-phosphate
  modified_base 12: mod_base = OTHER; note = 2'-deoxy-2'-fluorouridine-3'-phosphate
  modified_base 13: mod_base = OTHER; note = 2'-O-methyluridine-3'-phosphate
  modified_base 14: mod_base = OTHER; note = 2'-deoxy-2'-fluoroguanosine-3'-phosphate
  modified_base 15: mod_base = OTHER; note = 2'-O-methylguanosine-3'-phosphate
  modified_base 16: mod_base = OTHER; note = 2'-deoxy-2'-fluorouridine-3'-phosphate
  modified_base 17: mod_base = OTHER; note = 2'-O-methyluridine-3'-phosphate
  modified_base 18: mod_base = OTHER; note = 2'-deoxy-2'-fluoroadenosine-3'-phosphate
  modified_base 19: mod_base = OTHER; note = 2'-O-methylcytidine-3'-phosphate
  modified_base 20: mod_base = OTHER; note = 2'-deoxy-2'-fluoroadenosine-3'-phosphate
  modified_base 21: mod_base = OTHER; note = 2'-O-methyluridine-3'-phosphorothioate
  modified_base 22: mod_base = OTHER; note = 2'-deoxy-2'-fluoroguanosine-3'-phosphorothioate
  modified_base 23: mod_base = OTHER; note = 2'-O-methyladenosine
atggaatactcttggttacatga

SEQ ID NO: 536 - DNA, 23 bp, synthetic construct
  source 1..23: mol_type = other DNA
  modified_base 2: mod_base = OTHER; note = uridine-3'-phosphate
  modified_base 4: mod_base = OTHER; note = guanosine-3'-phosphate
  modified_base 6: mod_base = OTHER; note = adenosine-3'-phosphate
  modified_base 7: mod_base = OTHER; note = 2'-O-methyluridine-3'-phosphate
  modified_base 8: mod_base = OTHER; note = 2'-deoxy-2'-fluoroadenosine-3'-phosphate
  modified_base 9: mod_base = OTHER; note = 2'-O-methylcytidine-3'-phosphate
  modified_base 10: mod_base = OTHER; note = 2'-deoxy-2'-fluorouridine-3'-phosphate
  modified_base 11: mod_base = OTHER; note = 2'-O-methylcytidine-3'-phosphate
  modified_base 12: mod_base = OTHER; note = 2'-deoxy-2'-fluorouridine-3'-phosphate
  modified_base 13: mod_base = OTHER; note = 2'-O-methyluridine-3'-phosphate
  modified_base 14: mod_base = OTHER; note = 2'-deoxy-2'-fluoroguanosine-3'-phosphate
  modified_base 15: mod_base = OTHER; note = 2'-deoxy-2'-fluoroguanosine-3'-phosphate
  modified_base 16: mod_base = OTHER; note = 2'-deoxy-2'-fluorouridine-3'-phosphate
  modified_base 17: mod_base = OTHER; note = 2'-O-methyluridine-3'-phosphate
  modified_base 18: mod_base = OTHER; note = 2'-deoxy-2'-fluoroadenosine-3'-phosphate
  modified_base 19: mod_base = OTHER; note = 2'-deoxy-2'-fluorocytidine-3'-phosphate
  modified_base 20: mod_base = OTHER; note = 2'-deoxy-2'-fluoroadenosine-3'-phosphate
  modified_base 21: mod_base = OTHER; note = 2'-O-methyluridine-3'-phosphorothioate
  modified_base 22: mod_base = OTHER; note = 2'-deoxy-2'-fluoroguanosine-3'-phosphorothioate
  modified_base 23: mod_base = OTHER; note = 2'-O-methyladenosine
  misc_feature 2: note = RNA
  misc_feature 4: note = RNA
  misc_feature 6..23: note = RNA
  misc_feature 1: note = DNA
  misc_feature 5: note = DNA
atggaatactcttggttacatga

SEQ ID NO: 537 - RNA, 23 nt, synthetic construct
  source 1..23: mol_type = other RNA
  modified_base 1: mod_base = OTHER; note = 2'-O-methyladenosine-3'-phosphate
  modified_base 2: mod_base = OTHER; note = 2'-deoxy-2'-fluorouridine-3'-phosphate
  modified_base 3: mod_base = OTHER; note = 2'-O-methylguanosine-3'-phosphate
  modified_base 4: mod_base = OTHER; note = 2'-deoxy-2'-fluoroguanosine-3'-phosphate
  modified_base 5: mod_base = OTHER; note = 2'-O-methyladenosine-3'-phosphate
  modified_base 6: mod_base = OTHER; note = 2'-deoxy-2'-fluoroadenosine-3'-phosphate
  modified_base 7: mod_base = OTHER; note = 2'-O-methyluridine-3'-phosphate
  modified_base 8: mod_base = OTHER; note = 2'-deoxy-2'-fluoroadenosine-3'-phosphate
  modified_base 9: mod_base = OTHER; note = 2'-O-methylcytidine-3'-phosphate
  modified_base 10: mod_base = OTHER; note = 2'-deoxy-2'-fluorouridine-3'-phosphate
  modified_base 11: mod_base = OTHER; note = 2'-O-methylcytidine-3'-phosphate
  modified_base 12: mod_base = OTHER; note = 2'-deoxy-2'-fluorouridine-3'-phosphate
  modified_base 13: mod_base = OTHER; note = 2'-O-methyluridine-3'-phosphate
  modified_base 14: mod_base = OTHER; note = 2'-deoxy-2'-fluoroguanosine-3'-phosphate
  modified_base 15: mod_base = OTHER; note = 2'-deoxy-2'-fluoroguanosine-3'-phosphate
  modified_base 16: mod_base = OTHER; note = 2'-deoxy-2'-fluorouridine-3'-phosphate
  modified_base 17: mod_base = OTHER; note = 2'-O-methyluridine-3'-phosphate
  modified_base 18: mod_base = OTHER; note = 2'-O-methyladenosine-3'-phosphate
  modified_base 19: mod_base = OTHER; note = 2'-O-methylcytidine-3'-phosphate
  modified_base 20: mod_base = OTHER; note = 2'-deoxy-2'-fluoroadenosine-3'-phosphate
  modified_base 21: mod_base = OTHER; note = 2'-O-methyluridine-3'-phosphorothioate
  modified_base 22: mod_base = OTHER; note = 2'-deoxy-2'-fluoroguanosine-3'-phosphorothioate
  modified_base 23: mod_base = OTHER; note = 2'-O-methyladenosine
atggaatactcttggttacatga

SEQ ID NO: 538 - RNA, 23 nt, synthetic construct
  source 1..23: mol_type = other RNA
  modified_base 1: mod_base = OTHER; note = 2'-O-methyladenosine-3'-phosphate
  modified_base 2: mod_base = OTHER; note = 2'-deoxy-2'-fluorouridine-3'-phosphate
  modified_base 3: mod_base = OTHER; note = 2'-O-methylguanosine-3'-phosphate
  modified_base 4: mod_base = OTHER; note = 2'-deoxy-2'-fluoroguanosine-3'-phosphate
  modified_base 5: mod_base = OTHER; note = 2'-O-methyladenosine-3'-phosphate
  modified_base 6: mod_base = OTHER; note = 2'-deoxy-2'-fluoroadenosine-3'-phosphate
  modified_base 7: mod_base = OTHER; note = 2'-O-methyluridine-3'-phosphate
  modified_base 8: mod_base = OTHER; note = 2'-deoxy-2'-fluoroadenosine-3'-phosphate
  modified_base 9: mod_base = OTHER; note = 2'-deoxy-2'-fluorocytidine-3'-phosphate
  modified_base 10: mod_base = OTHER; note = 2'-deoxy-2'-fluorouridine-3'-phosphate
  modified_base 11: mod_base = OTHER; note = 2'-O-methylcytidine-3'-phosphate
  modified_base 12: mod_base = OTHER; note = 2'-deoxy-2'-fluorouridine-3'-phosphate
  modified_base 13: mod_base = OTHER; note = 2'-O-methyluridine-3'-phosphate
  modified_base 14: mod_base = OTHER; note = 2'-deoxy-2'-fluoroguanosine-3'-phosphate
  modified_base 15: mod_base = OTHER; note = 2'-O-methylguanosine-3'-phosphate
  modified_base 16: mod_base = OTHER; note = 2'-deoxy-2'-fluorouridine-3'-phosphate
  modified_base 17: mod_base = OTHER; note = 2'-O-methyluridine-3'-phosphate
  modified_base 18: mod_base = OTHER; note = 2'-deoxy-2'-fluoroadenosine-3'-phosphate
  modified_base 19: mod_base = OTHER; note = 2'-O-methylcytidine-3'-phosphate
  modified_base 20: mod_base = OTHER; note = 2'-deoxy-2'-fluoroadenosine-3'-phosphate
  modified_base 21: mod_base = OTHER; note = 2'-O-methyluridine-3'-phosphorothioate
  modified_base 22: mod_base = OTHER; note = 2'-deoxy-2'-fluoroguanosine-3'-phosphorothioate
  modified_base 23: mod_base = OTHER; note = 2'-O-methyladenosine
atggaatactcttggttacatga

SEQ ID NO: 539 - RNA, 23 nt, synthetic construct
  source 1..23: mol_type = other RNA
  modified_base 1: mod_base = OTHER; note = 2'-O-methyladenosine-3'-phosphate
  modified_base 2: mod_base = OTHER; note = 2'-deoxy-2'-fluorouridine-3'-phosphate
  modified_base 3: mod_base = OTHER; note = 2'-O-methylguanosine-3'-phosphate
  modified_base 4: mod_base = OTHER; note = 2'-deoxy-2'-fluoroguanosine-3'-phosphate
  modified_base 5: mod_base = OTHER; note = 2'-O-methyladenosine-3'-phosphate
  modified_base 6: mod_base = OTHER; note = 2'-deoxy-2'-fluoroadenosine-3'-phosphate
  modified_base 7: mod_base = OTHER; note = 2'-O-methyluridine-3'-phosphate
  modified_base 8: mod_base = OTHER; note = 2'-O-methyladenosine-3'-phosphate
  modified_base 9: mod_base = OTHER; note = 2'-O-methylcytidine-3'-phosphate
  modified_base 10: mod_base = OTHER; note = 2'-deoxy-2'-fluorouridine-3'-phosphate
  modified_base 11: mod_base = OTHER; note = 2'-O-methylcytidine-3'-phosphate
  modified_base 12: mod_base = OTHER; note = 2'-deoxy-2'-fluorouridine-3'-phosphate
  modified_base 13: mod_base = OTHER; note = 2'-O-methyluridine-3'-phosphate
  modified_base 14: mod_base = OTHER; note = 2'-deoxy-2'-fluoroguanosine-3'-phosphate
  modified_base 15: mod_base = OTHER; note = 2'-O-methylguanosine-3'-phosphate
  modified_base 16: mod_base = OTHER; note = 2'-deoxy-2'-fluorouridine-3'-phosphate
  modified_base 17: mod_base = OTHER; note = 2'-O-methyluridine-3'-phosphate
  modified_base 18: mod_base = OTHER; note = 2'-deoxy-2'-fluoroadenosine-3'-phosphate
  modified_base 19: mod_base = OTHER; note = 2'-O-methylcytidine-3'-phosphate
  modified_base 20: mod_base = OTHER; note = 2'-deoxy-2'-fluoroadenosine-3'-phosphate
  modified_base 21: mod_base = OTHER; note = 2'-deoxy-2'-fluorouridine-3'-phosphorothioate
  modified_base 22: mod_base = OTHER; note = 2'-deoxy-2'-fluoroguanosine-3'-phosphorothioate
  modified_base 23: mod_base = OTHER; note = 2'-O-methyladenosine
atggaatactcttggttacatga

SEQ ID NO: 540 - RNA, 23 nt, synthetic construct
  source 1..23: mol_type = other RNA
  modified_base 1: mod_base = OTHER; note = 2'-O-methyladenosine-3'-phosphate
  modified_base 2: mod_base = OTHER; note = 2'-deoxy-2'-fluorouridine-3'-phosphate
  modified_base 3: mod_base = OTHER; note = 2'-O-methylguanosine-3'-phosphate
  modified_base 4: mod_base = OTHER; note = 2'-deoxy-2'-fluoroguanosine-3'-phosphate
  modified_base 5: mod_base = OTHER; note = 2'-O-methyladenosine-3'-phosphate
  modified_base 6: mod_base = OTHER; note = 2'-deoxy-2'-fluoroadenosine-3'-phosphate
  modified_base 7: mod_base = OTHER; note = 2'-O-methyluridine-3'-phosphate
  modified_base 8: mod_base = OTHER; note = 2'-O-methyladenosine-3'-phosphate
  modified_base 9: mod_base = OTHER; note = 2'-O-methylcytidine-3'-phosphate
  modified_base 10: mod_base = OTHER; note = 2'-deoxy-2'-fluorouridine-3'-phosphate
  modified_base 11: mod_base = OTHER; note = 2'-O-methylcytidine-3'-phosphate
  modified_base 12: mod_base = OTHER; note = 2'-deoxy-2'-fluorouridine-3'-phosphate
  modified_base 13: mod_base = OTHER; note = 2'-O-methyluridine-3'-phosphate
  modified_base 14: mod_base = OTHER; note = 2'-deoxy-2'-fluoroguanosine-3'-phosphate
  modified_base 15: mod_base = OTHER; note = 2'-O-methylguanosine-3'-phosphate
  modified_base 16: mod_base = OTHER; note = 2'-deoxy-2'-fluorouridine-3'-phosphate
  modified_base 17: mod_base = OTHER; note = 2'-O-methyluridine-3'-phosphate
  modified_base 18: mod_base = OTHER; note = 2'-deoxy-2'-fluoroadenosine-3'-phosphate
  modified_base 19: mod_base = OTHER; note = 2'-deoxy-2'-fluorocytidine-3'-phosphate
  modified_base 20: mod_base = OTHER; note = 2'-deoxy-2'-fluoroadenosine-3'-phosphate
  modified_base 21: mod_base = OTHER; note = 2'-O-methyluridine-3'-phosphorothioate
  modified_base 22: mod_base = OTHER; note = 2'-deoxy-2'-fluoroguanosine-3'-phosphorothioate
  modified_base 23: mod_base = OTHER; note = 2'-O-methyladenosine
atggaatactcttggttacatga

SEQ ID NO: 541 - DNA, 23 bp, synthetic construct
  source 1..23: mol_type = other DNA
  modified_base 1: mod_base = OTHER; note = 2'-O-methyladenosine-3'-phosphate
  modified_base 4: mod_base = OTHER; note = 2'-deoxy-2'-fluoroguanosine-3'-phosphate
  modified_base 5: mod_base = OTHER; note = 2'-O-methyladenosine-3'-phosphate
  modified_base 8: mod_base = OTHER; note = 2'-deoxy-2'-fluoroadenosine-3'-phosphate
  modified_base 9: mod_base = OTHER; note = 2'-O-methylcytidine-3'-phosphate
  modified_base 10: mod_base = OTHER; note = 2'-deoxy-2'-fluorouridine-3'-phosphate
  modified_base 11: mod_base = OTHER; note = 2'-O-methylcytidine-3'-phosphate
  modified_base 12: mod_base = OTHER; note = 2'-deoxy-2'-fluorouridine-3'-phosphate
  modified_base 13: mod_base = OTHER; note = 2'-O-methyluridine-3'-phosphate
  modified_base 14: mod_base = OTHER; note = 2'-deoxy-2'-fluoroguanosine-3'-phosphate
  modified_base 15: mod_base = OTHER; note = 2'-O-methylguanosine-3'-phosphate
  modified_base 16: mod_base = OTHER; note = 2'-deoxy-2'-fluorouridine-3'-phosphate
  modified_base 17: mod_base = OTHER; note = 2'-O-methyluridine-3'-phosphate
  modified_base 18: mod_base = OTHER; note = 2'-deoxy-2'-fluoroadenosine-3'-phosphate
  modified_base 19: mod_base = OTHER; note = 2'-O-methylcytidine-3'-phosphate
  modified_base 20: mod_base = OTHER; note = 2'-deoxy-2'-fluoroadenosine-3'-phosphate
  modified_base 21: mod_base = OTHER; note = 2'-O-methyluridine-3'-phosphorothioate
  modified_base 22: mod_base = OTHER; note = 2'-deoxy-2'-fluoroguanosine-3'-phosphorothioate
  modified_base 23: mod_base = OTHER; note = 2'-O-methyladenosine
  misc_feature 1: note = RNA
  misc_feature 4..5: note = RNA
  misc_feature 8..23: note = RNA
  misc_feature 2..3: note = DNA
  misc_feature 6..7: note = DNA
atggaatactcttggttacatga

SEQ ID NO: 542 - RNA, 23 nt, synthetic construct
  source 1..23: mol_type = other RNA
  modified_base 1: mod_base = OTHER; note = 2'-O-methyladenosine-3'-phosphate
  modified_base 2: mod_base = OTHER; note = 2'-deoxy-2'-fluorouridine-3'-phosphate
  modified_base 3: mod_base = OTHER; note = 2'-O-methylguanosine-3'-phosphate
  modified_base 4: mod_base = OTHER; note = 2'-deoxy-2'-fluoroguanosine-3'-phosphate
  modified_base 5: mod_base = OTHER; note = 2'-O-methyladenosine-3'-phosphate
  modified_base 6: mod_base = OTHER; note = 2'-deoxy-2'-fluoroadenosine-3'-phosphate
  modified_base 7: mod_base = OTHER; note = 2'-O-methyluridine-3'-phosphate
  modified_base 8: mod_base = OTHER; note = 2'-O-methyladenosine-3'-phosphate
  modified_base 9: mod_base = OTHER; note = 2'-O-methylcytidine-3'-phosphate
  modified_base 10: mod_base = OTHER; note = 2'-deoxy-2'-fluorouridine-3'-phosphate
  modified_base 11: mod_base = OTHER; note = 2'-O-methylcytidine-3'-phosphate
  modified_base 12: mod_base = OTHER; note = 2'-deoxy-2'-fluorouridine-3'-phosphate
  modified_base 13: mod_base = OTHER; note = 2'-O-methyluridine-3'-phosphate
  modified_base 14: mod_base = OTHER; note = 2'-deoxy-2'-fluoroguanosine-3'-phosphate
  modified_base 15: mod_base = OTHER; note = 2'-O-methylguanosine-3'-phosphate
  modified_base 16: mod_base = OTHER; note = 2'-deoxy-2'-fluorouridine-3'-phosphate
  modified_base 17: mod_base = OTHER; note = 2'-deoxy-2'-fluorouridine-3'-phosphate
  modified_base 18: mod_base = OTHER; note = 2'-deoxy-2'-fluoroadenosine-3'-phosphate
  modified_base 19: mod_base = OTHER; note = 2'-O-methylcytidine-3'-phosphate
  modified_base 20: mod_base = OTHER; note = 2'-deoxy-2'-fluoroadenosine-3'-phosphate
  modified_base 21: mod_base = OTHER; note = 2'-O-methyluridine-3'-phosphorothioate
  modified_base 22: mod_base = OTHER; note = 2'-deoxy-2'-fluoroguanosine-3'-phosphorothioate
  modified_base 23: mod_base = OTHER; note = 2'-O-methyladenosine
atggaatactcttggttacatga

SEQ ID NO: 543 - RNA, 23 nt, synthetic construct
  source 1..23: mol_type = other RNA
  modified_base 1: mod_base = OTHER; note = 2'-deoxy-2'-fluoroadenosine-3'-phosphate
  modified_base 2: mod_base = OTHER; note = 2'-deoxy-2'-fluorouridine-3'-phosphate
  modified_base 3: mod_base = OTHER; note = 2'-deoxy-2'-fluoroguanosine-3'-phosphate
  modified_base 4: mod_base = OTHER; note = 2'-deoxy-2'-fluoroguanosine-3'-phosphate
  modified_base 5: mod_base = OTHER; note = 2'-deoxy-2'-fluoroadenosine-3'-phosphate
  modified_base 6: mod_base = OTHER; note = 2'-deoxy-2'-fluoroadenosine-3'-phosphate
  modified_base 7: mod_base = OTHER; note = 2'-deoxy-2'-fluorouridine-3'-phosphate
  modified_base 8: mod_base = OTHER; note = 2'-deoxy-2'-fluoroadenosine-3'-phosphate
  modified_base 9: mod_base = OTHER; note = 2'-deoxy-2'-fluorocytidine-3'-phosphate
  modified_base 10: mod_base = OTHER; note = 2'-deoxy-2'-fluorouridine-3'-phosphate
  modified_base 11: mod_base = OTHER; note = 2'-deoxy-2'-fluorocytidine-3'-phosphate
  modified_base 12: mod_base = OTHER; note = 2'-deoxy-2'-fluorouridine-3'-phosphate
  modified_base 13: mod_base = OTHER; note = 2'-deoxy-2'-fluorouridine-3'-phosphate
  modified_base 14: mod_base = OTHER; note = 2'-deoxy-2'-fluoroguanosine-3'-phosphate
  modified_base 15: mod_base = OTHER; note = 2'-deoxy-2'-fluoroguanosine-3'-phosphate
  modified_base 16: mod_base = OTHER; note = 2'-deoxy-2'-fluorouridine-3'-phosphate
  modified_base 17: mod_base = OTHER; note = 2'-deoxy-2'-fluorouridine-3'-phosphate
  modified_base 18: mod_base = OTHER; note = 2'-deoxy-2'-fluoroadenosine-3'-phosphate
  modified_base 19: mod_base = OTHER; note = 2'-deoxy-2'-fluorocytidine-3'-phosphate
  modified_base 20: mod_base = OTHER; note = 2'-deoxy-2'-fluoroadenosine-3'-phosphate
  modified_base 21: mod_base = OTHER; note = 2'-deoxy-2'-fluorouridine-3'-phosphorothioate
  modified_base 22: mod_base = OTHER; note = 2'-O-methylguanosine-3'-phosphorothioate
  modified_base 23: mod_base = OTHER; note = 2'-O-methyladenosine
atggaatactcttggttacatga

SEQ ID NO: 544 - RNA, 23 nt, synthetic construct
  source 1..23: mol_type = other RNA
  modified_base 1: mod_base = OTHER; note = 2'-O-methyladenosine-3'-phosphate
  modified_base 2: mod_base = OTHER; note = 2'-deoxy-2'-fluorouridine-3'-phosphate
  modified_base 3: mod_base = OTHER; note = 2'-O-methylguanosine-3'-phosphate
  modified_base 4: mod_base = OTHER; note = 2'-deoxy-2'-fluoroguanosine-3'-phosphate
  modified_base 5: mod_base = OTHER; note = 2'-O-methyladenosine-3'-phosphate
  modified_base 6: mod_base = OTHER; note = 2'-deoxy-2'-fluoroadenosine-3'-phosphate
  modified_base 7: mod_base = OTHER; note = 2'-O-methyluridine-3'-phosphate
  modified_base 8: mod_base = OTHER; note = 2'-deoxy-2'-fluoroadenosine-3'-phosphate
  modified_base 9: mod_base = OTHER; note = 2'-O-methylcytidine-3'-phosphate
  modified_base 10: mod_base = OTHER; note = 2'-deoxy-2'-fluorouridine-3'-phosphate
  modified_base 11: mod_base = OTHER; note = 2'-O-methylcytidine-3'-phosphate
  modified_base 12: mod_base = OTHER; note = 2'-deoxy-2'-fluorouridine-3'-phosphate
  modified_base 13: mod_base = OTHER; note = 2'-O-methyluridine-3'-phosphate
  modified_base 14: mod_base = OTHER; note = 2'-deoxy-2'-fluoroguanosine-3'-phosphate
  modified_base 15: mod_base = OTHER; note = 2'-O-methylguanosine-3'-phosphate
  modified_base 16: mod_base = OTHER; note = 2'-deoxy-2'-fluorouridine-3'-phosphate
  modified_base 17: mod_base = OTHER; note = 2'-O-methyluridine-3'-phosphate
  modified_base 18: mod_base = OTHER; note = 2'-deoxy-2'-fluoroadenosine-3'-phosphate
  modified_base 19: mod_base = OTHER; note = 2'-O-methylcytidine-3'-phosphate
  modified_base 20: mod_base = OTHER; note = 2'-deoxy-2'-fluoroadenosine-3'-phosphate
  modified_base 21: mod_base = OTHER; note = 2'-O-methyluridine-3'-phosphorothioate
  modified_base 22: mod_base = OTHER; note = 2'-deoxy-2'-fluoroguanosine-3'-phosphorothioate
  modified_base 23: mod_base = OTHER; note = 2'-O-methyladenosine
atggaatactcttggttacatga

SEQ ID NO: 545 - RNA, 23 nt, synthetic construct
  source 1..23: mol_type = other RNA
  modified_base 1: mod_base = OTHER; note = 2'-O-methyladenosine-3'-phosphate
  modified_base 2: mod_base = OTHER; note = 2'-deoxy-2'-fluorouridine-3'-phosphate
  modified_base 3: mod_base = OTHER; note = 2'-O-methylguanosine-3'-phosphate
  modified_base 4: mod_base = OTHER; note = 2'-deoxy-2'-fluoroguanosine-3'-phosphate
  modified_base 5: mod_base = OTHER; note = 2'-O-methyladenosine-3'-phosphate
  modified_base 6: mod_base = OTHER; note = 2'-deoxy-2'-fluoroadenosine-3'-phosphate
  modified_base 7: mod_base = OTHER; note = 2'-O-methyluridine-3'-phosphate
  modified_base 8: mod_base = OTHER; note = 2'-deoxy-2'-fluoroadenosine-3'-phosphate
  modified_base 9: mod_base = OTHER; note = 2'-O-methylcytidine-3'-phosphate
  modified_base 10: mod_base = OTHER; note = 2'-deoxy-2'-fluorouridine-3'-phosphate
  modified_base 11: mod_base = OTHER; note = 2'-O-methylcytidine-3'-phosphate
  modified_base 12: mod_base = OTHER; note = 2'-deoxy-2'-fluorouridine-3'-phosphate
  modified_base 13: mod_base = OTHER; note = 2'-O-methyluridine-3'-phosphate
  modified_base 14: mod_base = OTHER; note = 2'-deoxy-2'-fluoroguanosine-3'-phosphate
  modified_base 15: mod_base = OTHER; note = 2'-O-methylguanosine-3'-phosphate
  modified_base 16: mod_base = OTHER; note = 2'-deoxy-2'-fluorouridine-3'-phosphate
  modified_base 17: mod_base = OTHER; note = 2'-O-methyluridine-3'-phosphate
  modified_base 18: mod_base = OTHER; note = 2'-deoxy-2'-fluoroadenosine-3'-phosphate
  modified_base 19: mod_base = OTHER; note = 2'-O-methylcytidine-3'-phosphate
  modified_base 20: mod_base = OTHER; note = 2'-deoxy-2'-fluoroadenosine-3'-phosphate
  modified_base 21: mod_base = OTHER; note = 2'-O-methyluridine-3'-phosphorothioate
  modified_base 22: mod_base = OTHER; note = 2'-deoxy-2'-fluoroguanosine-3'-phosphorothioate
  modified_base 23: mod_base = OTHER; note = 2'-O-methyladenosine
atggaatactcttggttacatga

SEQ ID NO: 546 - RNA, 23 nt, synthetic construct
  source 1..23: mol_type = other RNA
  modified_base 1: mod_base = OTHER; note = 2'-O-methyladenosine-3'-phosphate
  modified_base 2: mod_base = OTHER; note = 2'-deoxy-2'-fluorouridine-3'-phosphate
  modified_base 3: mod_base = OTHER; note = 2'-O-methylguanosine-3'-phosphate
  modified_base 4: mod_base = OTHER; note = 2'-deoxy-2'-fluoroguanosine-3'-phosphate
  modified_base 5: mod_base = OTHER; note = 2'-O-methyladenosine-3'-phosphate
  modified_base 6: mod_base = OTHER; note = 2'-deoxy-2'-fluoroadenosine-3'-phosphate
  modified_base 7: mod_base = OTHER; note = 2'-O-methyluridine-3'-phosphate
  modified_base 8: mod_base = OTHER; note = 2'-deoxy-2'-fluoroadenosine-3'-phosphate
  modified_base 9: mod_base = OTHER; note = 2'-O-methylcytidine-3'-phosphate
  modified_base 10: mod_base = OTHER; note = 2'-deoxy-2'-fluorouridine-3'-phosphate
  modified_base 11: mod_base = OTHER; note = 2'-O-methylcytidine-3'-phosphate
  modified_base 12: mod_base = OTHER; note = 2'-deoxy-2'-fluorouridine-3'-phosphate
  modified_base 13: mod_base = OTHER; note = 2'-O-methyluridine-3'-phosphate
  modified_base 14: mod_base = OTHER; note = 2'-deoxy-2'-fluoroguanosine-3'-phosphate
  modified_base 15: mod_base = OTHER; note = 2'-deoxy-2'-fluoroguanosine-3'-phosphate
  modified_base 16: mod_base = OTHER; note = 2'-deoxy-2'-fluorouridine-3'-phosphate
  modified_base 17: mod_base = OTHER; note = 2'-O-methyluridine-3'-phosphate
  modified_base 18: mod_base = OTHER; note = 2'-deoxy-2'-fluoroadenosine-3'-phosphate
  modified_base 19: mod_base = OTHER; note = 2'-O-methylcytidine-3'-phosphate
  modified_base 20: mod_base = OTHER; note = 2'-deoxy-2'-fluoroadenosine-3'-phosphate
  modified_base 21: mod_base = OTHER; note = 2'-O-methyluridine-3'-phosphorothioate
  modified_base 22: mod_base = OTHER; note = 2'-deoxy-2'-fluoroguanosine-3'-phosphorothioate
  modified_base 23: mod_base = OTHER; note = 2'-O-methyladenosine
atggaatactcttggttacatga

SEQ ID NO: 547 - RNA, 23 nt, synthetic construct
  source 1..23: mol_type = other RNA
  modified_base 1: mod_base = OTHER; note = 2'-O-methyladenosine-3'-phosphate
  modified_base 2: mod_base = OTHER; note = 2'-deoxy-2'-fluorouridine-3'-phosphate
  modified_base 3: mod_base = OTHER; note = 2'-deoxy-2'-fluoroguanosine-3'-phosphate
  modified_base 4: mod_base = OTHER; note = 2'-deoxy-2'-fluoroguanosine-3'-phosphate
  modified_base 5: mod_base = OTHER; note = 2'-O-methyladenosine-3'-phosphate
  modified_base 6: mod_base = OTHER; note = 2'-deoxy-2'-fluoroadenosine-3'-phosphate
  modified_base 7: mod_base = OTHER; note = 2'-O-methyluridine-3'-phosphate
  modified_base 8: mod_base = OTHER; note = 2'-deoxy-2'-fluoroadenosine-3'-phosphate
  modified_base 9: mod_base = OTHER; note = 2'-O-methylcytidine-3'-phosphate
  modified_base 10: mod_base = OTHER; note = 2'-deoxy-2'-fluorouridine-3'-phosphate
  modified_base 11: mod_base = OTHER; note = 2'-O-methylcytidine-3'-phosphate
  modified_base 12: mod_base = OTHER; note = 2'-deoxy-2'-fluorouridine-3'-phosphate
  modified_base 13: mod_base = OTHER; note = 2'-O-methyluridine-3'-phosphate
  modified_base 14: mod_base = OTHER; note = 2'-deoxy-2'-fluoroguanosine-3'-phosphate
  modified_base 15: mod_base = OTHER; note = 2'-O-methylguanosine-3'-phosphate
  modified_base 16: mod_base = OTHER; note = 2'-deoxy-2'-fluorouridine-3'-phosphate
  modified_base 17: mod_base = OTHER; note = 2'-O-methyluridine-3'-phosphate
  modified_base 18: mod_base = OTHER; note = 2'-deoxy-2'-fluoroadenosine-3'-phosphate
  modified_base 19: mod_base = OTHER; note = 2'-O-methylcytidine-3'-phosphate
  modified_base 20: mod_base = OTHER; note = 2'-O-methyladenosine-3'-phosphate
  modified_base 21: mod_base = OTHER; note = 2'-O-methyluridine-3'-phosphorothioate
  modified_base 22: mod_base = OTHER; note = 2'-deoxy-2'-fluoroguanosine-3'-phosphorothioate
  modified_base 23: mod_base = OTHER; note = 2'-O-methyladenosine
atggaatactcttggttacatga

SEQ ID NO: 548 - RNA, 23 nt, synthetic construct
  source 1..23: mol_type = other RNA
  modified_base 1: mod_base = OTHER; note = 2'-O-methyladenosine-3'-phosphate
  modified_base 2: mod_base = OTHER; note = 2'-deoxy-2'-fluorouridine-3'-phosphate
  modified_base 3: mod_base = OTHER; note = 2'-O-methylguanosine-3'-phosphate
  modified_base 4: mod_base = OTHER; note = 2'-deoxy-2'-fluoroguanosine-3'-phosphate
  modified_base 5: mod_base = OTHER; note = 2'-O-methyladenosine-3'-phosphate
  modified_base 6: mod_base = OTHER; note = 2'-deoxy-2'-fluoroadenosine-3'-phosphate
  modified_base 7: mod_base = OTHER; note = 2'-O-methyluridine-3'-phosphate
  modified_base 8: mod_base = OTHER; note = 2'-deoxy-2'-fluoroadenosine-3'-phosphate
  modified_base 9: mod_base = OTHER; note = 2'-O-methylcytidine-3'-phosphate
  modified_base 10: mod_base = OTHER; note = 2'-deoxy-2'-fluorouridine-3'-phosphate
  modified_base 11: mod_base = OTHER; note = 2'-O-methylcytidine-3'-phosphate
  modified_base 12: mod_base = OTHER; note = 2'-deoxy-2'-fluorouridine-3'-phosphate
  modified_base 13: mod_base = OTHER; note = 2'-O-methyluridine-3'-phosphate
  modified_base 14: mod_base = OTHER; note = 2'-deoxy-2'-fluoroguanosine-3'-phosphate
  modified_base 15: mod_base = OTHER; note = 2'-O-methylguanosine-3'-phosphate
  modified_base 16: mod_base = OTHER; note = 2'-O-methyluridine-3'-phosphate
  modified_base 17: mod_base = OTHER; note = 2'-O-methyluridine-3'-phosphate
  modified_base 18: mod_base = OTHER; note = 2'-deoxy-2'-fluoroadenosine-3'-phosphate
  modified_base 19: mod_base = OTHER; note = 2'-O-methylcytidine-3'-phosphate
  modified_base 20: mod_base = OTHER; note = 2'-deoxy-2'-fluoroadenosine-3'-phosphate
  modified_base 21: mod_base = OTHER; note = 2'-deoxy-2'-fluorouridine-3'-phosphorothioate
  modified_base 22: mod_base = OTHER; note = 2'-deoxy-2'-fluoroguanosine-3'-phosphorothioate
  modified_base 23: mod_base = OTHER; note = 2'-O-methyladenosine
atggaatactcttggttacatga

SEQ ID NO: 549 - RNA, 23 nt, synthetic construct
  source 1..23: mol_type = other RNA
  modified_base 1: mod_base = OTHER; note = 2'-O-methyladenosine-3'-phosphate
  modified_base 2: mod_base = OTHER; note = 2'-deoxy-2'-fluorouridine-3'-phosphate
  modified_base 3: mod_base = OTHER; note = 2'-O-methylguanosine-3'-phosphate
  modified_base 4: mod_base = OTHER; note = 2'-deoxy-2'-fluoroguanosine-3'-phosphate
  modified_base 5: mod_base = OTHER; note = 2'-O-methyladenosine-3'-phosphate
  modified_base 6: mod_base = OTHER; note = 2'-O-methyladenosine-3'-phosphate
  modified_base 7: mod_base = OTHER; note = 2'-O-methyluridine-3'-phosphate
  modified_base 8: mod_base = OTHER; note = 2'-deoxy-2'-fluoroadenosine-3'-phosphate
  modified_base 9: mod_base = OTHER; note = 2'-O-methylcytidine-3'-phosphate
  modified_base 10: mod_base = OTHER; note = 2'-deoxy-2'-fluorouridine-3'-phosphate
  modified_base 11: mod_base = OTHER; note = 2'-O-methylcytidine-3'-phosphate
  modified_base 12: mod_base = OTHER; note = 2'-deoxy-2'-fluorouridine-3'-phosphate
  modified_base 13: mod_base = OTHER; note = 2'-O-methyluridine-3'-phosphate
  modified_base 14: mod_base = OTHER; note = 2'-deoxy-2'-fluoroguanosine-3'-phosphate
  modified_base 15: mod_base = OTHER; note = 2'-O-methylguanosine-3'-phosphate
  modified_base 16: mod_base = OTHER; note = 2'-deoxy-2'-fluorouridine-3'-phosphate
  modified_base 17: mod_base = OTHER; note = 2'-O-methyluridine-3'-phosphate
  modified_base 18: mod_base = OTHER; note = 2'-deoxy-2'-fluoroadenosine-3'-phosphate
  modified_base 19: mod_base = OTHER; note = 2'-O-methylcytidine-3'-phosphate
  modified_base 20: mod_base = OTHER; note = 2'-deoxy-2'-fluoroadenosine-3'-phosphate
  modified_base 21: mod_base = OTHER; note = 2'-O-methyluridine-3'-phosphorothioate
  modified_base 22: mod_base = OTHER; note = 2'-deoxy-2'-fluoroguanosine-3'-phosphorothioate
  modified_base 23: mod_base = OTHER; note = 2'-O-methyladenosine
atggaatactcttggttacatga

SEQ ID NO: 550 - RNA, 23 nt, synthetic construct
  source 1..23: mol_type = other RNA
  modified_base 1: mod_base = OTHER; note = 2'-O-methyladenosine-3'-phosphate
  modified_base 2: mod_base = OTHER; note = 2'-deoxy-2'-fluorouridine-3'-phosphate
  modified_base 3: mod_base = OTHER; note = 2'-O-methylguanosine-3'-phosphate
  modified_base 4: mod_base = OTHER; note = 2'-deoxy-2'-fluoroguanosine-3'-phosphate
  modified_base 5: mod_base = OTHER; note = 2'-O-methyladenosine-3'-phosphate
  modified_base 6: mod_base = OTHER; note = 2'-deoxy-2'-fluoroadenosine-3'-phosphate
  modified_base 7: mod_base = OTHER; note = 2'-O-methyluridine-3'-phosphate
  modified_base 8: mod_base = OTHER; note = 2'-deoxy-2'-fluoroadenosine-3'-phosphate
  modified_base 9: mod_base = OTHER; note = 2'-O-methylcytidine-3'-phosphate
  modified_base 10: mod_base = OTHER; note = 2'-deoxy-2'-fluorouridine-3'-phosphate
  modified_base 11: mod_base = OTHER; note = 2'-O-methylcytidine-3'-phosphate
  modified_base 12: mod_base = OTHER; note = 2'-deoxy-2'-fluorouridine-3'-phosphate
  modified_base 13: mod_base = OTHER; note = 2'-deoxy-2'-fluorouridine-3'-phosphate
  modified_base 14: mod_base = OTHER; note = 2'-deoxy-2'-fluoroguanosine-3'-phosphate
  modified_base 15: mod_base = OTHER; note = 2'-O-methylguanosine-3'-phosphate
  modified_base 16: mod_base = OTHER; note = 2'-deoxy-2'-fluorouridine-3'-phosphate
  modified_base 17: mod_base = OTHER; note = 2'-O-methyluridine-3'-phosphate
  modified_base 18: mod_base = OTHER; note = 2'-deoxy-2'-fluoroadenosine-3'-phosphate
  modified_base 19: mod_base = OTHER; note = 2'-O-methylcytidine-3'-phosphate
  modified_base 20: mod_base = OTHER; note = 2'-deoxy-2'-fluoroadenosine-3'-phosphate
  modified_base 21: mod_base = OTHER; note = 2'-O-methyluridine-3'-phosphorothioate
  modified_base 22: mod_base = OTHER; note = 2'-deoxy-2'-fluoroguanosine-3'-phosphorothioate
  modified_base 23: mod_base = OTHER; note = 2'-O-methyladenosine
atggaatactcttggttacatga

SEQ ID NO: 551 - RNA, 23 nt, synthetic construct
  source 1..23: mol_type = other RNA
  modified_base 1: mod_base = OTHER; note = 2'-O-methyladenosine-3'-phosphate
  modified_base 2: mod_base = OTHER; note = 2'-deoxy-2'-fluorouridine-3'-phosphate
  modified_base 3: mod_base = OTHER; note = 2'-O-methylguanosine-3'-phosphate
  modified_base 4: mod_base = OTHER; note = 2'-deoxy-2'-fluoroguanosine-3'-phosphate
  modified_base 5: mod_base = OTHER; note = 2'-deoxy-2'-fluoroadenosine-3'-phosphate
  modified_base 6: mod_base = OTHER; note = 2'-deoxy-2'-fluoroadenosine-3'-phosphate
  modified_base 7: mod_base = OTHER; note = 2'-O-methyluridine-3'-phosphate
  modified_base 8: mod_base = OTHER; note = 2'-deoxy-2'-fluoroadenosine-3'-phosphate
  modified_base 9: mod_base = OTHER; note = 2'-O-methylcytidine-3'-phosphate
  modified_base 10: mod_base = OTHER; note = 2'-deoxy-2'-fluorouridine-3'-phosphate
  modified_base 11: mod_base = OTHER; note = 2'-O-methylcytidine-3'-phosphate
  modified_base 12: mod_base = OTHER; note = 2'-deoxy-2'-fluorouridine-3'-phosphate
  modified_base 13: mod_base = OTHER; note = 2'-O-methyluridine-3'-phosphate
  modified_base 14: mod_base = OTHER; note = 2'-deoxy-2'-fluoroguanosine-3'-phosphate
  modified_base 15: mod_base = OTHER; note = 2'-O-methylguanosine-3'-phosphate
  modified_base 16: mod_base = OTHER; note = 2'-deoxy-2'-fluorouridine-3'-phosphate
  modified_base 17: mod_base = OTHER; note = 2'-O-methyluridine-3'-phosphate
  modified_base 18: mod_base = OTHER; note = 2'-deoxy-2'-fluoroadenosine-3'-phosphate
  modified_base 19: mod_base = OTHER; note = 2'-O-methylcytidine-3'-phosphate
  modified_base 20: mod_base = OTHER; note = 2'-O-methyladenosine-3'-phosphate
  modified_base 21: mod_base = OTHER; note = 2'-O-methyluridine-3'-phosphorothioate
  modified_base 22: mod_base = OTHER; note = 2'-deoxy-2'-fluoroguanosine-3'-phosphorothioate
  modified_base 23: mod_base = OTHER; note = 2'-O-methyladenosine
atggaatactcttggttacatga

SEQ ID NO: 552 - RNA, 23 nt, synthetic construct
  source 1..23: mol_type = other RNA
  modified_base 1: mod_base = OTHER; note = 2'-O-methyladenosine-3'-phosphate
  modified_base 2: mod_base = OTHER; note = 2'-deoxy-2'-fluorouridine-3'-phosphate
  modified_base 3: mod_base = OTHER; note = 2'-O-methylguanosine-3'-phosphate
  modified_base 4: mod_base = OTHER; note = 2'-deoxy-2'-fluoroguanosine-3'-phosphate
  modified_base 5: mod_base = OTHER; note = 2'-O-methyladenosine-3'-phosphate
  modified_base 6: mod_base = OTHER; note = 2'-deoxy-2'-fluoroadenosine-3'-phosphate
  modified_base 7: mod_base = OTHER; note = 2'-O-methyluridine-3'-phosphate
  modified_base 8: mod_base = OTHER; note = 2'-deoxy-2'-fluoroadenosine-3'-phosphate
  modified_base 9: mod_base = OTHER; note = 2'-O-methylcytidine-3'-phosphate
  modified_base 10: mod_base = OTHER; note = 2'-deoxy-2'-fluorouridine-3'-phosphate
  modified_base 11: mod_base = OTHER; note = 2'-O-methylcytidine-3'-phosphate
  modified_base 12: mod_base = OTHER; note = 2'-deoxy-2'-fluorouridine-3'-phosphate
  modified_base 13: mod_base = OTHER; note = 2'-O-methyluridine-3'-phosphate
  modified_base 14: mod_base = OTHER; note = 2'-deoxy-2'-fluoroguanosine-3'-phosphate
  modified_base 15: mod_base = OTHER; note = 2'-O-methylguanosine-3'-phosphate
  modified_base 16: mod_base = OTHER; note = 2'-O-methyluridine-3'-phosphate
  modified_base 17: mod_base = OTHER; note = 2'-O-methyluridine-3'-phosphate
  modified_base 18: mod_base = OTHER; note = 2'-deoxy-2'-fluoroadenosine-3'-phosphate
  modified_base 19: mod_base = OTHER; note = 2'-deoxy-2'-fluorocytidine-3'-phosphate
  modified_base 20: mod_base = OTHER; note = 2'-deoxy-2'-fluoroadenosine-3'-phosphate
  modified_base 21: mod_base = OTHER; note = 2'-O-methyluridine-3'-phosphorothioate
  modified_base 22: mod_base = OTHER; note = 2'-deoxy-2'-fluoroguanosine-3'-phosphorothioate
  modified_base 23: mod_base = OTHER; note = 2'-O-methyladenosine
atggaatactcttggttacatga

SEQ ID NO: 553 - RNA, 23 nt, synthetic construct
  source 1..23: mol_type = other RNA
  modified_base 1: mod_base = OTHER; note = 2'-O-methyladenosine-3'-phosphate
  modified_base 2: mod_base = OTHER; note = 2'-deoxy-2'-fluorouridine-3'-phosphate
  modified_base 3: mod_base = OTHER; note = 2'-O-methylguanosine-3'-phosphate
  modified_base 4: mod_base = OTHER; note = 2'-deoxy-2'-fluoroguanosine-3'-phosphate
  modified_base 5: mod_base = OTHER; note = 2'-O-methyladenosine-3'-phosphate
  modified_base 6: mod_base = OTHER; note = 2'-deoxy-2'-fluoroadenosine-3'-phosphate
  modified_base 7: mod_base = OTHER; note = 2'-O-methyluridine-3'-phosphate
  modified_base 8: mod_base = OTHER; note = 2'-deoxy-2'-fluoroadenosine-3'-phosphate
  modified_base 9: mod_base = OTHER; note = 2'-O-methylcytidine-3'-phosphate
  modified_base 10: mod_base = OTHER; note = 2'-deoxy-2'-fluorouridine-3'-phosphate
  modified_base 11: mod_base = OTHER; note = 2'-O-methylcytidine-3'-phosphate
  modified_base 12: mod_base = OTHER; note = 2'-deoxy-2'-fluorouridine-3'-phosphate
  modified_base 13: mod_base = OTHER; note = 2'-O-methyluridine-3'-phosphate
  modified_base 14: mod_base = OTHER; note = 2'-deoxy-2'-fluoroguanosine-3'-phosphate
  modified_base 15: mod_base = OTHER; note = 2'-O-methylguanosine-3'-phosphate
  modified_base 16: mod_base = OTHER; note = 2'-deoxy-2'-fluorouridine-3'-phosphate
  modified_base 17: mod_base = OTHER; note = 2'-O-methyluridine-3'-phosphate
  modified_base 18: mod_base = OTHER; note = 2'-deoxy-2'-fluoroadenosine-3'-phosphate
  modified_base 19: mod_base = OTHER; note = 2'-O-methylcytidine-3'-phosphate
  modified_base 20: mod_base = OTHER; note = 2'-O-methyladenosine-3'-phosphate
  modified_base 21: mod_base = OTHER; note = 2'-O-methyluridine-3'-phosphorothioate
  modified_base 22: mod_base = OTHER; note = 2'-deoxy-2'-fluoroguanosine-3'-phosphorothioate
  modified_base 23: mod_base = OTHER; note = 2'-O-methyladenosine
atggaatactcttggttacatga

SEQ ID NO: 554 - RNA, 23 nt, synthetic construct
  source 1..23: mol_type = other RNA
  modified_base 1: mod_base = OTHER; note = 2'-O-methyladenosine-3'-phosphate
  modified_base 2: mod_base = OTHER; note = 2'-deoxy-2'-fluorouridine-3'-phosphate
  modified_base 3: mod_base = OTHER; note = 2'-O-methylguanosine-3'-phosphate
  modified_base 4: mod_base = OTHER; note = 2'-O-methylguanosine-3'-phosphate
  modified_base 5: mod_base = OTHER; note = 2'-O-methyladenosine-3'-phosphate
  modified_base 6: mod_base = OTHER; note = 2'-deoxy-2'-fluoroadenosine-3'-phosphate
  modified_base 7: mod_base = OTHER; note = 2'-O-methyluridine-3'-phosphate
  modified_base 8: mod_base = OTHER; note = 2'-deoxy-2'-fluoroadenosine-3'-phosphate
  modified_base 9: mod_base = OTHER; note = 2'-O-methylcytidine-3'-phosphate
  modified_base 10: mod_base = OTHER; note = 2'-deoxy-2'-fluorouridine-3'-phosphate
  modified_base 11: mod_base = OTHER; note = 2'-O-methylcytidine-3'-phosphate
  modified_base 12: mod_base = OTHER; note = 2'-deoxy-2'-fluorouridine-3'-phosphate
  modified_base 13: mod_base = OTHER; note = 2'-O-methyluridine-3'-phosphate
  modified_base 14: mod_base = OTHER; note = 2'-deoxy-2'-fluoroguanosine-3'-phosphate
  modified_base 15: mod_base = OTHER; note = 2'-O-methylguanosine-3'-phosphate
  modified_base 16: mod_base = OTHER; note = 2'-deoxy-2'-fluorouridine-3'-phosphate
  modified_base 17: mod_base = OTHER; note = 2'-O-methyluridine-3'-phosphate
  modified_base 18: mod_base = OTHER; note = 2'-deoxy-2'-fluoroadenosine-3'-phosphate
  modified_base 19: mod_base = OTHER; note = 2'-O-methylcytidine-3'-phosphate
  modified_base 20: mod_base = OTHER; note = 2'-deoxy-2'-fluoroadenosine-3'-phosphate
  modified_base 21: mod_base = OTHER; note = 2'-O-methyluridine-3'-phosphorothioate
  modified_base 22: mod_base = OTHER; note = 2'-deoxy-2'-fluoroguanosine-3'-phosphorothioate
  modified_base 23: mod_base = OTHER; note = 2'-O-methyladenosine
atggaatactcttggttacatga

SEQ ID NO: 555 - RNA, 23 nt, synthetic construct
  source 1..23: mol_type = other RNA
  modified_base 1: mod_base = OTHER; note = 2'-O-methyladenosine-3'-phosphate
  modified_base 2: mod_base = OTHER; note = 2'-deoxy-2'-fluorouridine-3'-phosphate
  modified_base 3: mod_base = OTHER; note = 2'-O-methylguanosine-3'-phosphate
  modified_base 4: mod_base = OTHER; note = 2'-deoxy-2'-fluoroguanosine-3'-phosphate
  modified_base 5: mod_base = OTHER; note = 2'-O-methyladenosine-3'-phosphate
  modified_base 6: mod_base = OTHER; note = 2'-deoxy-2'-fluoroadenosine-3'-phosphate
  modified_base 7: mod_base = OTHER; note = 2'-O-methyluridine-3'-phosphate
  modified_base 8: mod_base = OTHER; note = 2'-deoxy-2'-fluoroadenosine-3'-phosphate
  modified_base 9: mod_base = OTHER; note = 2'-O-methylcytidine-3'-phosphate
  modified_base 10: mod_base = OTHER; note = 2'-deoxy-2'-fluorouridine-3'-phosphate
  modified_base 11: mod_base = OTHER; note = 2'-deoxy-2'-fluorocytidine-3'-phosphate
  modified_base 12: mod_base = OTHER; note = 2'-deoxy-2'-fluorouridine-3'-phosphate
  modified_base 13: mod_base = OTHER; note = 2'-O-methyluridine-3'-phosphate
  modified_base 14: mod_base = OTHER; note = 2'-deoxy-2'-fluoroguanosine-3'-phosphate
  modified_base 15: mod_base = OTHER; note = 2'-O-methylguanosine-3'-phosphate
  modified_base 16: mod_base = OTHER; note = 2'-deoxy-2'-fluorouridine-3'-phosphate
  modified_base 17: mod_base = OTHER; note = 2'-O-methyluridine-3'-phosphate
  modified_base 18: mod_base = OTHER; note = 2'-deoxy-2'-fluoroadenosine-3'-phosphate
  modified_base 19: mod_base = OTHER; note = 2'-O-methylcytidine-3'-phosphate
  modified_base 20: mod_base = OTHER; note = 2'-deoxy-2'-fluoroadenosine-3'-phosphate
  modified_base 21: mod_base = OTHER; note = 2'-O-methyluridine-3'-phosphorothioate
  modified_base 22: mod_base = OTHER; note = 2'-deoxy-2'-fluoroguanosine-3'-phosphorothioate
  modified_base 23: mod_base = OTHER; note = 2'-O-methyladenosine
atggaatactcttggttacatga

SEQ ID NO: 556 - RNA, 23 nt, synthetic construct
  source 1..23: mol_type = other RNA
  modified_base 1: mod_base = OTHER; note = 2'-O-methyladenosine-3'-phosphate
  modified_base 2: mod_base = OTHER; note = 2'-deoxy-2'-fluorouridine-3'-phosphate
  modified_base 3: mod_base = OTHER; note = 2'-O-methylguanosine-3'-phosphate
  modified_base 4: mod_base = OTHER; note = 2'-deoxy-2'-fluoroguanosine-3'-phosphate
  modified_base 5: mod_base = OTHER; note = 2'-O-methyladenosine-3'-phosphate
  modified_base 6: mod_base = OTHER; note = 2'-deoxy-2'-fluoroadenosine-3'-phosphate
  modified_base 7: mod_base = OTHER; note = 2'-O-methyluridine-3'-phosphate
  modified_base 8: mod_base = OTHER; note = 2'-deoxy-2'-fluoroadenosine-3'-phosphate
  modified_base 9: mod_base = OTHER; note = 2'-O-methylcytidine-3'-phosphate
  modified_base 10: mod_base = OTHER; note = 2'-deoxy-2'-fluorouridine-3'-phosphate
  modified_base 11: mod_base = OTHER; note = 2'-O-methylcytidine-3'-phosphate
  modified_base 12: mod_base = OTHER; note = 2'-deoxy-2'-fluorouridine-3'-phosphate
  modified_base 13: mod_base = OTHER; note = 2'-deoxy-2'-fluorouridine-3'-phosphate
  modified_base 14: mod_base = OTHER; note = 2'-deoxy-2'-fluoroguanosine-3'-phosphate
  modified_base 15: mod_base = OTHER; note = 2'-O-methylguanosine-3'-phosphate
  modified_base 16: mod_base = OTHER; note = 2'-O-methyluridine-3'-phosphate
  modified_base 17: mod_base = OTHER; note = 2'-O-methyluridine-3'-phosphate
  modified_base 18: mod_base = OTHER; note = 2'-deoxy-2'-fluoroadenosine-3'-phosphate
  modified_base 19: mod_base = OTHER; note = 2'-O-methylcytidine-3'-phosphate
  modified_base 20: mod_base = OTHER; note = 2'-deoxy-2'-fluoroadenosine-3'-phosphate
  modified_base 21: mod_base = OTHER; note = 2'-O-methyluridine-3'-phosphorothioate
  modified_base 22: mod_base = OTHER; note = 2'-deoxy-2'-fluoroguanosine-3'-phosphorothioate
  modified_base 23: mod_base = OTHER; note = 2'-O-methyladenosine
atggaatactcttggttacatga

SEQ ID NO: 557 - RNA, 23 nt, synthetic construct
  source 1..23: mol_type = other RNA
  modified_base 1: mod_base = OTHER; note = 2'-O-methyladenosine-3'-phosphate
  modified_base 2: mod_base = OTHER; note = 2'-deoxy-2'-fluorouridine-3'-phosphate
  modified_base 3: mod_base = OTHER; note = 2'-O-methylguanosine-3'-phosphate
  modified_base 4: mod_base = OTHER; note = 2'-deoxy-2'-fluoroguanosine-3'-phosphate
  modified_base 5: mod_base = OTHER; note = 2'-O-methyladenosine-3'-phosphate
  modified_base 6: mod_base = OTHER; note = 2'-deoxy-2'-fluoroadenosine-3'-phosphate
  modified_base 7: mod_base = OTHER; note = 2'-O-methyluridine-3'-phosphate
  modified_base 8: mod_base = OTHER; note = 2'-deoxy-2'-fluoroadenosine-3'-phosphate
  modified_base 9: mod_base = OTHER; note = 2'-O-methylcytidine-3'-phosphate
  modified_base 10: mod_base = OTHER; note = 2'-deoxy-2'-fluorouridine-3'-phosphate
  modified_base 11: mod_base = OTHER; note = 2'-O-methylcytidine-3'-phosphate
  modified_base 12: mod_base = OTHER; note = 2'-deoxy-2'-fluorouridine-3'-phosphate
  modified_base 13: mod_base = OTHER; note = 2'-O-methyluridine-3'-phosphate
  modified_base 14: mod_base = OTHER; note = 2'-deoxy-2'-fluoroguanosine-3'-phosphate
  modified_base 15: mod_base = OTHER; note = 2'-O-methylguanosine-3'-phosphate
  modified_base 16: mod_base = OTHER; note = 2'-deoxy-2'-fluorouridine-3'-phosphate
  modified_base 17: mod_base = OTHER; note = 2'-O-methyluridine-3'-phosphate
  modified_base 18: mod_base = OTHER; note = 2'-O-methyladenosine-3'-phosphate
  modified_base 19: mod_base = OTHER; note = 2'-O-methylcytidine-3'-phosphate
  modified_base 20: mod_base = OTHER; note = 2'-deoxy-2'-fluoroadenosine-3'-phosphate
  modified_base 21: mod_base = OTHER; note = 2'-O-methyluridine-3'-phosphorothioate
  modified_base 22: mod_base = OTHER; note = 2'-deoxy-2'-fluoroguanosine-3'-phosphorothioate
  modified_base 23: mod_base = OTHER; note = 2'-O-methyladenosine
atggaatactcttggttacatga

SEQ ID NO: 558 - RNA, 23 nt, synthetic construct
  source 1..23: mol_type = other RNA
  modified_base 1: mod_base = OTHER; note = 2'-O-methyladenosine-3'-phosphate
  modified_base 2: mod_base = OTHER; note = 2'-O-methyluridine-3'-phosphate
  modified_base 3: mod_base = OTHER; note = 2'-O-methylguanosine-3'-phosphate
  modified_base 4: mod_base = OTHER; note = 2'-deoxy-2'-fluoroguanosine-3'-phosphate
  modified_base 5: mod_base = OTHER; note = 2'-O-methyladenosine-3'-phosphate
  modified_base 6: mod_base = OTHER; note = 2'-deoxy-2'-fluoroadenosine-3'-phosphate
  modified_base 7: mod_base = OTHER; note = 2'-O-methyluridine-3'-phosphate
  modified_base 8: mod_base = OTHER; note = 2'-deoxy-2'-fluoroadenosine-3'-phosphate
  modified_base 9: mod_base = OTHER; note = 2'-O-methylcytidine-3'-phosphate
  modified_base 10: mod_base = OTHER; note = 2'-deoxy-2'-fluorouridine-3'-phosphate
  modified_base 11: mod_base = OTHER; note = 2'-O-methylcytidine-3'-phosphate
  modified_base 12: mod_base = OTHER; note = 2'-deoxy-2'-fluorouridine-3'-phosphate
  modified_base 13: mod_base = OTHER; note = 2'-O-methyluridine-3'-phosphate
  modified_base 14: mod_base = OTHER; note = 2'-deoxy-2'-fluoroguanosine-3'-phosphate
  modified_base 15: mod_base = OTHER; note = 2'-O-methylguanosine-3'-phosphate
  modified_base 16: mod_base = OTHER; note = 2'-deoxy-2'-fluorouridine-3'-phosphate
  modified_base 17: mod_base = OTHER; note = 2'-O-methyluridine-3'-phosphate
  modified_base 18: mod_base = OTHER; note = 2'-deoxy-2'-fluoroadenosine-3'-phosphate
  modified_base 19: mod_base = OTHER; note = 2'-O-methylcytidine-3'-phosphate
  modified_base 20: mod_base = OTHER; note = 2'-deoxy-2'-fluoroadenosine-3'-phosphate
  modified_base 21: mod_base = OTHER; note = 2'-O-methyluridine-3'-phosphorothioate
  modified_base 22: mod_base = OTHER; note = 2'-deoxy-2'-fluoroguanosine-3'-phosphorothioate
  modified_base 23: mod_base = OTHER; note = 2'-O-methyladenosine
atggaatactcttggttacatga

SEQ ID NO: 559 - RNA, 23 nt, synthetic construct
  source 1..23: mol_type = other RNA
  modified_base 1: mod_base = OTHER; note = 2'-O-methyladenosine-3'-phosphate
  modified_base 2: mod_base = OTHER; note = 2'-deoxy-2'-fluorouridine-3'-phosphate
  modified_base 3: mod_base = OTHER; note = 2'-O-methylguanosine-3'-phosphate
  modified_base 4: mod_base = OTHER; note = 2'-deoxy-2'-fluoroguanosine-3'-phosphate
  modified_base 5: mod_base = OTHER; note = 2'-O-methyladenosine-3'-phosphate
  modified_base 6: mod_base = OTHER; note = 2'-deoxy-2'-fluoroadenosine-3'-phosphate
  modified_base 7: mod_base = OTHER; note = 2'-O-methyluridine-3'-phosphate
  modified_base 8: mod_base = OTHER; note = 2'-deoxy-2'-fluoroadenosine-3'-phosphate
  modified_base 9: mod_base = OTHER; note = 2'-deoxy-2'-fluorocytidine-3'-phosphate
  modified_base 10: mod_base = OTHER; note = 2'-deoxy-2'-fluorouridine-3'-phosphate
  modified_base 11: mod_base = OTHER; note = 2'-O-methylcytidine-3'-phosphate
  modified_base 12: mod_base = OTHER; note = 2'-deoxy-2'-fluorouridine-3'-phosphate
  modified_base 13: mod_base = OTHER; note = 2'-O-methyluridine-3'-phosphate
  modified_base 14: mod_base = OTHER; note = 2'-deoxy-2'-fluoroguanosine-3'-phosphate
  modified_base 15: mod_base = OTHER; note = 2'-O-methylguanosine-3'-phosphate
  modified_base 16: mod_base = OTHER; note = 2'-deoxy-2'-fluorouridine-3'-phosphate
  modified_base 17: mod_base = OTHER; note = 2'-O-methyluridine-3'-phosphate
  modified_base 18: mod_base = OTHER; note = 2'-deoxy-2'-fluoroadenosine-3'-phosphate
  modified_base 19: mod_base = OTHER; note = 2'-O-methylcytidine-3'-phosphate
  modified_base 20: mod_base = OTHER; note = 2'-O-methyladenosine-3'-phosphate
  modified_base 21: mod_base = OTHER; note = 2'-O-methyluridine-3'-phosphorothioate
  modified_base 22: mod_base = OTHER; note = 2'-deoxy-2'-fluoroguanosine-3'-phosphorothioate
  modified_base 23: mod_base = OTHER; note = 2'-O-methyladenosine
atggaatactcttggttacatga

SEQ ID NO: 560 - RNA, 23 nt, synthetic construct
  source 1..23: mol_type = other RNA
  modified_base 1: mod_base = OTHER; note = 2'-O-methyladenosine-3'-phosphate
  modified_base 2: mod_base = OTHER; note = 2'-deoxy-2'-fluorouridine-3'-phosphate
  modified_base 3: mod_base = OTHER; note = 2'-O-methylguanosine-3'-phosphate
  modified_base 4: mod_base = OTHER; note = 2'-deoxy-2'-fluoroguanosine-3'-phosphate
  modified_base 5: mod_base = OTHER; note = 2'-O-methyladenosine-3'-phosphate
  modified_base 6: mod_base = OTHER; note = 2'-deoxy-2'-fluoroadenosine-3'-phosphate
  modified_base 7: mod_base = OTHER; note = 2'-O-methyluridine-3'-phosphate
  modified_base 8: mod_base = OTHER; note = 2'-deoxy-2'-fluoroadenosine-3'-phosphate
  modified_base 9: mod_base = OTHER; note = 2'-deoxy-2'-fluorocytidine-3'-phosphate
  modified_base 10: mod_base = OTHER; note = 2'-deoxy-2'-fluorouridine-3'-phosphate
  modified_base 11: mod_base = OTHER; note = 2'-O-methylcytidine-3'-phosphate
  modified_base 12: mod_base = OTHER; note = 2'-deoxy-2'-fluorouridine-3'-phosphate
  modified_base 13: mod_base = OTHER; note = 2'-O-methyluridine-3'-phosphate
  modified_base 14: mod_base = OTHER; note = 2'-deoxy-2'-fluoroguanosine-3'-phosphate
  modified_base 15: mod_base = OTHER; note = 2'-O-methylguanosine-3'-phosphate
  modified_base 16: mod_base = OTHER; note = 2'-deoxy-2'-fluorouridine-3'-phosphate
  modified_base 17: mod_base = OTHER; note = 2'-O-methyluridine-3'-phosphate
  modified_base 18: mod_base = OTHER; note = 2'-O-methyladenosine-3'-phosphate
  modified_base 19: mod_base = OTHER; note = 2'-O-methylcytidine-3'-phosphate
  modified_base 20: mod_base = OTHER; note = 2'-deoxy-2'-fluoroadenosine-3'-phosphate
  modified_base 21: mod_base = OTHER; note = 2'-O-methyluridine-3'-phosphorothioate
  modified_base 22: mod_base = OTHER; note = 2'-deoxy-2'-fluoroguanosine-3'-phosphorothioate
  modified_base 23: mod_base = OTHER; note = 2'-O-methyladenosine
atggaatactcttggttacatga

SEQ ID NO: 561 - RNA, 23 nt, synthetic construct
  source 1..23: mol_type = other RNA
  modified_base 1: mod_base = OTHER; note = 2'-O-methyladenosine-3'-phosphate
  modified_base 2: mod_base = OTHER; note = 2'-deoxy-2'-fluorouridine-3'-phosphate
  modified_base 3: mod_base = OTHER; note = 2'-O-methylguanosine-3'-phosphate
  modified_base 4: mod_base = OTHER; note = 2'-deoxy-2'-fluoroguanosine-3'-phosphate
  modified_base 5: mod_base = OTHER; note = 2'-O-methyladenosine-3'-phosphate
  modified_base 6: mod_base = OTHER; note = 2'-deoxy-2'-fluoroadenosine-3'-phosphate
  modified_base 7: mod_base = OTHER; note = 2'-O-methyluridine-3'-phosphate
  modified_base 8: mod_base = OTHER; note = 2'-deoxy-2'-fluoroadenosine-3'-phosphate
  modified_base 9: mod_base = OTHER; note = 2'-O-methylcytidine-3'-phosphate
  modified_base 10: mod_base = OTHER; note = 2'-deoxy-2'-fluorouridine-3'-phosphate
  modified_base 11: mod_base = OTHER; note = 2'-deoxy-2'-fluorocytidine-3'-phosphate
  modified_base 12: mod_base = OTHER; note = 2'-deoxy-2'-fluorouridine-3'-phosphate
  modified_base 13: mod_base = OTHER; note = 2'-O-methyluridine-3'-phosphate
  modified_base 14: mod_base = OTHER; note = 2'-deoxy-2'-fluoroguanosine-3'-phosphate
  modified_base 15: mod_base = OTHER; note = 2'-O-methylguanosine-3'-phosphate
  modified_base 16: mod_base = OTHER; note = 2'-O-methyluridine-3'-phosphate
  modified_base 17: mod_base = OTHER; note = 2'-O-methyluridine-3'-phosphate
  modified_base 18: mod_base = OTHER; note = 2'-deoxy-2'-fluoroadenosine-3'-phosphate
  modified_base 19: mod_base = OTHER; note = 2'-O-methylcytidine-3'-phosphate
  modified_base 20: mod_base = OTHER; note = 2'-deoxy-2'-fluoroadenosine-3'-phosphate
  modified_base 21: mod_base = OTHER; note = 2'-O-methyluridine-3'-phosphorothioate
  modified_base 22: mod_base = OTHER; note = 2'-deoxy-2'-fluoroguanosine-3'-phosphorothioate
  modified_base 23: mod_base = OTHER; note = 2'-O-methyladenosine
atggaatactcttggttacatga

SEQ ID NO: 562 - RNA, 23 nt, synthetic construct
  source 1..23: mol_type = other RNA
  modified_base 1: mod_base = OTHER; note = 2'-O-methyladenosine-3'-phosphate
  modified_base 2: mod_base = OTHER; note = 2'-deoxy-2'-fluorouridine-3'-phosphate
  modified_base 3: mod_base = OTHER; note = 2'-O-methylguanosine-3'-phosphate
  modified_base 4: mod_base = OTHER; note = 2'-deoxy-2'-fluoroguanosine-3'-phosphate
  modified_base 5: mod_base = OTHER; note = 2'-O-methyladenosine-3'-phosphate
  modified_base 6: mod_base = OTHER; note = 2'-deoxy-2'-fluoroadenosine-3'-phosphate
  modified_base 7: mod_base = OTHER; note = 2'-O-methyluridine-3'-phosphate
  modified_base 8: mod_base = OTHER; note = 2'-deoxy-2'-fluoroadenosine-3'-phosphate
  modified_base 9: mod_base = OTHER; note = 2'-O-methylcytidine-3'-phosphate
  modified_base 10: mod_base = OTHER; note = 2'-deoxy-2'-fluorouridine-3'-phosphate
  modified_base 11: mod_base = OTHER; note = 2'-O-methylcytidine-3'-phosphate
  modified_base 12: mod_base = OTHER; note = 2'-deoxy-2'-fluorouridine-3'-phosphate
  modified_base 13: mod_base = OTHER; note = 2'-O-methyluridine-3'-phosphate
  modified_base 14: mod_base = OTHER; note = 2'-deoxy-2'-fluoroguanosine-3'-phosphate
  modified_base 15: mod_base = OTHER; note = 2'-O-methylguanosine-3'-phosphate
  modified_base 16: mod_base = OTHER; note = 2'-O-methyluridine-3'-phosphate
  modified_base 17: mod_base = OTHER; note = 2'-O-methyluridine-3'-phosphate
  modified_base 18: mod_base = OTHER; note = 2'-deoxy-2'-fluoroadenosine-3'-phosphate
  modified_base 19: mod_base = OTHER; note = 2'-O-methylcytidine-3'-phosphate
  modified_base 20: mod_base = OTHER; note = 2'-deoxy-2'-fluoroadenosine-3'-phosphate
  modified_base 21: mod_base = OTHER; note = 2'-O-methyluridine-3'-phosphorothioate
  modified_base 22: mod_base = OTHER; note = 2'-deoxy-2'-fluoroguanosine-3'-phosphorothioate
  modified_base 23: mod_base = OTHER; note = 2'-O-methyladenosine
atggaatactcttggttacatga

SEQ ID NO: 563 - RNA, 23 nt, synthetic construct
  source 1..23: mol_type = other RNA
  modified_base 1: mod_base = OTHER; note = 2'-O-methyladenosine-3'-phosphate
  modified_base 2: mod_base = OTHER; note = 2'-deoxy-2'-fluorouridine-3'-phosphate
  modified_base 3: mod_base = OTHER; note = 2'-O-methylguanosine-3'-phosphate
  modified_base 4: mod_base = OTHER; note = 2'-deoxy-2'-fluoroguanosine-3'-phosphate
  modified_base 5: mod_base = OTHER; note = 2'-O-methyladenosine-3'-phosphate
  modified_base 6: mod_base = OTHER; note = 2'-deoxy-2'-fluoroadenosine-3'-phosphate
  modified_base 7: mod_base = OTHER; note = 2'-O-methyluridine-3'-phosphate
  modified_base 8: mod_base = OTHER; note = 2'-deoxy-2'-fluoroadenosine-3'-phosphate
  modified_base 9: mod_base = OTHER; note = 2'-O-methylcytidine-3'-phosphate
  modified_base 10: mod_base = OTHER; note = 2'-deoxy-2'-fluorouridine-3'-phosphate
  modified_base 11: mod_base = OTHER; note = 2'-O-methylcytidine-3'-phosphate
  modified_base 12: mod_base = OTHER; note = 2'-deoxy-2'-fluorouridine-3'-phosphate
  modified_base 13: mod_base = OTHER; note = 2'-O-methyluridine-3'-phosphate
  modified_base 14: mod_base = OTHER; note = 2'-deoxy-2'-fluoroguanosine-3'-phosphate
  modified_base 15: mod_base = OTHER; note = 2'-O-methylguanosine-3'-phosphate
  modified_base 16: mod_base = OTHER; note = 2'-deoxy-2'-fluorouridine-3'-phosphate
  modified_base 17: mod_base = OTHER; note = 2'-O-methyluridine-3'-phosphate
  modified_base 18: mod_base = OTHER; note = 2'-deoxy-2'-fluoroadenosine-3'-phosphate
  modified_base 19: mod_base = OTHER; note = 2'-O-methylcytidine-3'-phosphate
  modified_base 20: mod_base = OTHER; note = 2'-deoxy-2'-fluoroadenosine-3'-phosphate
  modified_base 21: mod_base = OTHER; note = 2'-O-methyluridine-3'-phosphorothioate
  modified_base 22: mod_base = OTHER; note = 2'-deoxy-2'-fluoroguanosine-3'-phosphorothioate
  modified_base 23: mod_base = OTHER; note = 2'-deoxy-2'-fluoroadenosine
atggaatactcttggttacatga

SEQ ID NO: 564 - RNA, 23 nt, synthetic construct
  source 1..23: mol_type = other RNA
  modified_base 1: mod_base = OTHER; note = 2'-O-methyladenosine-3'-phosphate
  modified_base 2: mod_base = OTHER; note = 2'-deoxy-2'-fluorouridine-3'-phosphate
  modified_base 3: mod_base = OTHER; note = 2'-O-methylguanosine-3'-phosphate
  modified_base 4: mod_base = OTHER; note = 2'-deoxy-2'-fluoroguanosine-3'-phosphate
  modified_base 5: mod_base = OTHER; note = 2'-O-methyladenosine-3'-phosphate
  modified_base 6: mod_base = OTHER; note = 2'-deoxy-2'-fluoroadenosine-3'-phosphate
  modified_base 7: mod_base = OTHER; note = 2'-O-methyluridine-3'-phosphate
  modified_base 8: mod_base = OTHER; note = 2'-deoxy-2'-fluoroadenosine-3'-phosphate
  modified_base 9: mod_base = OTHER; note = 2'-O-methylcytidine-3'-phosphate
  modified_base 10: mod_base = OTHER; note = 2'-deoxy-2'-fluorouridine-3'-phosphate
  modified_base 11: mod_base = OTHER; note = 2'-deoxy-2'-fluorocytidine-3'-phosphate
  modified_base 12: mod_base = OTHER; note = 2'-deoxy-2'-fluorouridine-3'-phosphate
  modified_base 13: mod_base = OTHER; note = 2'-O-methyluridine-3'-phosphate
  modified_base 14: mod_base = OTHER; note = 2'-deoxy-2'-fluoroguanosine-3'-phosphate
  modified_base 15: mod_base = OTHER; note = 2'-O-methylguanosine-3'-phosphate
  modified_base 16: mod_base = OTHER; note = 2'-deoxy-2'-fluorouridine-3'-phosphate
  modified_base 17: mod_base = OTHER; note = 2'-O-methyluridine-3'-phosphate
  modified_base 18: mod_base = OTHER; note = 2'-deoxy-2'-fluoroadenosine-3'-phosphate
  modified_base 19: mod_base = OTHER; note = 2'-O-methylcytidine-3'-phosphate
  modified_base 20: mod_base = OTHER; note = 2'-O-methyladenosine-3'-phosphate
  modified_base 21: mod_base = OTHER; note = 2'-O-methyluridine-3'-phosphorothioate
  modified_base 22: mod_base = OTHER; note = 2'-deoxy-2'-fluoroguanosine-3'-phosphorothioate
  modified_base 23: mod_base = OTHER; note = 2'-O-methyladenosine
atggaatactcttggttacatga

SEQ ID NO: 565 - RNA, 23 nt, synthetic construct
  source 1..23: mol_type = other RNA
  modified_base 1: mod_base = OTHER; note = 2'-O-methyladenosine-3'-phosphate
  modified_base 2: mod_base = OTHER; note = 2'-deoxy-2'-fluorouridine-3'-phosphate
  modified_base 3: mod_base = OTHER; note = 2'-O-methylguanosine-3'-phosphate
  modified_base 4: mod_base = OTHER; note = 2'-deoxy-2'-fluoroguanosine-3'-phosphate
  modified_base 5: mod_base = OTHER; note = 2'-O-methyladenosine-3'-phosphate
  modified_base 6: mod_base = OTHER; note = 2'-deoxy-2'-fluoroadenosine-3'-phosphate
  modified_base 7: mod_base = OTHER; note = 2'-O-methyluridine-3'-phosphate
  modified_base 8: mod_base = OTHER; note = 2'-deoxy-2'-fluoroadenosine-3'-phosphate
  modified_base 9: mod_base = OTHER; note = 2'-O-methylcytidine-3'-phosphate
  modified_base 10: mod_base = OTHER; note = 2'-deoxy-2'-fluorouridine-3'-phosphate
  modified_base 11: mod_base = OTHER; note = 2'-deoxy-2'-fluorocytidine-3'-phosphate
  modified_base 12: mod_base = OTHER; note = 2'-deoxy-2'-fluorouridine-3'-phosphate
  modified_base 13: mod_base = OTHER; note = 2'-O-methyluridine-3'-phosphate
  modified_base 14: mod_base = OTHER; note = 2'-deoxy-2'-fluoroguanosine-3'-phosphate
  modified_base 15: mod_base = OTHER; note = 2'-O-methylguanosine-3'-phosphate
  modified_base 16: mod_base = OTHER; note = 2'-deoxy-2'-fluorouridine-3'-phosphate
  modified_base 17: mod_base = OTHER; note = 2'-O-methyluridine-3'-phosphate
  modified_base 18: mod_base = OTHER; note = 2'-O-methyladenosine-3'-phosphate
  modified_base 19: mod_base = OTHER; note = 2'-O-methylcytidine-3'-phosphate
  modified_base 20: mod_base = OTHER; note = 2'-deoxy-2'-fluoroadenosine-3'-phosphate
  modified_base 21: mod_base = OTHER; note = 2'-O-methyluridine-3'-phosphorothioate
  modified_base 22: mod_base = OTHER; note = 2'-deoxy-2'-fluoroguanosine-3'-phosphorothioate
  modified_base 23: mod_base = OTHER; note = 2'-O-methyladenosine
atggaatactcttggttacatga

SEQ ID NO: 566 - RNA, 23 nt, synthetic construct
  source 1..23: mol_type = other RNA
  modified_base 1: mod_base = OTHER; note = 2'-O-methyladenosine-3'-phosphate
  modified_base 2: mod_base = OTHER; note = 2'-deoxy-2'-fluorouridine-3'-phosphate
  modified_base 3: mod_base = OTHER; note = 2'-O-methylguanosine-3'-phosphate
  modified_base 4: mod_base = OTHER; note = 2'-deoxy-2'-fluoroguanosine-3'-phosphate
  modified_base 5: mod_base = OTHER; note = 2'-O-methyladenosine-3'-phosphate
  modified_base 6: mod_base = OTHER; note = 2'-deoxy-2'-fluoroadenosine-3'-phosphate
  modified_base 7: mod_base = OTHER; note = 2'-O-methyluridine-3'-phosphate
  modified_base 8: mod_base = OTHER; note = 2'-deoxy-2'-fluoroadenosine-3'-phosphate
  modified_base 9: mod_base = OTHER; note = 2'-deoxy-2'-fluorocytidine-3'-phosphate
  modified_base 10: mod_base = OTHER; note = 2'-deoxy-2'-fluorouridine-3'-phosphate
  modified_base 11: mod_base = OTHER; note = 2'-O-methylcytidine-3'-phosphate
  modified_base 12: mod_base = OTHER; note = 2'-deoxy-2'-fluorouridine-3'-phosphate
  modified_base 13: mod_base = OTHER; note = 2'-O-methyluridine-3'-phosphate
  modified_base 14: mod_base = OTHER; note = 2'-deoxy-2'-fluoroguanosine-3'-phosphate
  modified_base 15: mod_base = OTHER; note = 2'-O-methylguanosine-3'-phosphate
  modified_base 16: mod_base = OTHER; note = 2'-O-methyluridine-3'-phosphate
  modified_base 17: mod_base = OTHER; note = 2'-O-methyluridine-3'-phosphate
  modified_base 18: mod_base = OTHER; note = 2'-deoxy-2'-fluoroadenosine-3'-phosphate
  modified_base 19: mod_base = OTHER; note = 2'-O-methylcytidine-3'-phosphate
  modified_base 20: mod_base = OTHER; note = 2'-deoxy-2'-fluoroadenosine-3'-phosphate
  modified_base 21: mod_base = OTHER; note = 2'-O-methyluridine-3'-phosphorothioate
  modified_base 22: mod_base = OTHER; note = 2'-deoxy-2'-fluoroguanosine-3'-phosphorothioate
  modified_base 23: mod_base = OTHER; note = 2'-O-methyladenosine
atggaatactcttggttacatga

SEQ ID NO: 567 - RNA, 23 nt, synthetic construct
  source 1..23: mol_type = other RNA
  modified_base 1: mod_base = OTHER; note = 2'-O-methyladenosine-3'-phosphate
  modified_base 2: mod_base = OTHER; note = 2'-deoxy-2'-fluorouridine-3'-phosphate
  modified_base 3: mod_base = OTHER; note = 2'-O-methylguanosine-3'-phosphate
  modified_base 4: mod_base = OTHER; note = 2'-deoxy-2'-fluoroguanosine-3'-phosphate
  modified_base 5: mod_base = OTHER; note = 2'-O-methyladenosine-3'-phosphate
  modified_base 6: mod_base = OTHER; note = 2'-deoxy-2'-fluoroadenosine-3'-phosphate
  modified_base 7: mod_base = OTHER; note = 2'-O-methyluridine-3'-phosphate
  modified_base 8: mod_base = OTHER; note = 2'-deoxy-2'-fluoroadenosine-3'-phosphate
  modified_base 9: mod_base = OTHER; note = 2'-O-methylcytidine-3'-phosphate
  modified_base 10: mod_base = OTHER; note = 2'-deoxy-2'-fluorouridine-3'-phosphate
  modified_base 11: mod_base = OTHER; note = 2'-O-methylcytidine-3'-phosphate
  modified_base 12: mod_base = OTHER; note = 2'-deoxy-2'-fluorouridine-3'-phosphate
  modified_base 13: mod_base = OTHER; note = 2'-O-methyluridine-3'-phosphate
  modified_base 14: mod_base = OTHER; note = 2'-O-methylguanosine-3'-phosphate
  modified_base 15: mod_base = OTHER; note = 2'-O-methylguanosine-3'-phosphate
  modified_base 16: mod_base = OTHER; note = 2'-deoxy-2'-fluorouridine-3'-phosphate
  modified_base 17: mod_base = OTHER; note = 2'-O-methyluridine-3'-phosphate
  modified_base 18: mod_base = OTHER; note = 2'-deoxy-2'-fluoroadenosine-3'-phosphate
  modified_base 19: mod_base = OTHER; note = 2'-O-methylcytidine-3'-phosphate
  modified_base 20: mod_base = OTHER; note = 2'-deoxy-2'-fluoroadenosine-3'-phosphate
  modified_base 21: mod_base = OTHER; note = 2'-O-methyluridine-3'-phosphorothioate
  modified_base 22: mod_base = OTHER; note = 2'-deoxy-2'-fluoroguanosine-3'-phosphorothioate
  modified_base 23: mod_base = OTHER; note = 2'-O-methyladenosine
atggaatactcttggttacatga

SEQ ID NO: 568 - RNA, 23 nt, synthetic construct
  source 1..23: mol_type = other RNA
  modified_base 1: mod_base = OTHER; note = 2'-O-methyladenosine-3'-phosphate
  modified_base 2: mod_base = OTHER; note = 2'-deoxy-2'-fluorouridine-3'-phosphate
  modified_base 3: mod_base = OTHER; note = 2'-O-methylguanosine-3'-phosphate
  modified_base 4: mod_base = OTHER; note = 2'-deoxy-2'-fluoroguanosine-3'-phosphate
  modified_base 5: mod_base = OTHER; note = 2'-O-methyladenosine-3'-phosphate
  modified_base 6: mod_base = OTHER; note = 2'-deoxy-2'-fluoroadenosine-3'-phosphate
  modified_base 7: mod_base = OTHER; note = 2'-O-methyluridine-3'-phosphate
  modified_base 8: mod_base = OTHER; note = 2'-deoxy-2'-fluoroadenosine-3'-phosphate
  modified_base 9: mod_base = OTHER; note = 2'-O-methylcytidine-3'-phosphate
  modified_base 10: mod_base = OTHER; note = 2'-deoxy-2'-fluorouridine-3'-phosphate
  modified_base 11: mod_base = OTHER; note = 2'-O-methylcytidine-3'-phosphate
  modified_base 12: mod_base = OTHER; note = 2'-deoxy-2'-fluorouridine-3'-phosphate
  modified_base 13: mod_base = OTHER; note = 2'-O-methyluridine-3'-phosphate
  modified_base 14: mod_base = OTHER; note = 2'-deoxy-2'-fluoroguanosine-3'-phosphate
  modified_base 15: mod_base = OTHER; note = 2'-O-methylguanosine-3'-phosphate
  modified_base 16: mod_base = OTHER; note = 2'-deoxy-2'-fluorouridine-3'-phosphate
  modified_base 17: mod_base = OTHER; note = 2'-O-methyluridine-3'-phosphate
  modified_base 18: mod_base = OTHER; note = 2'-deoxy-2'-fluoroadenosine-3'-phosphate
  modified_base 19: mod_base = OTHER; note = 2'-O-methylcytidine-3'-phosphate
  modified_base 20: mod_base = OTHER; note = 2'-deoxy-2'-fluoroadenosine-3'-phosphate
  modified_base 21: mod_base = OTHER; note = 2'-deoxy-2'-fluorouridine-3'-phosphorothioate
  modified_base 22: mod_base = OTHER; note = 2'-deoxy-2'-fluoroguanosine-3'-phosphorothioate
  modified_base 23: mod_base = OTHER; note = 2'-O-methyladenosine
atggaatactcttggttacatga

SEQ ID NO: 569 - RNA, 23 nt, synthetic construct
  source 1..23: mol_type = other RNA
  modified_base 1: mod_base = OTHER; note = 2'-O-methyladenosine-3'-phosphate
  modified_base 2: mod_base = OTHER; note = 2'-deoxy-2'-fluorouridine-3'-phosphate
  modified_base 3: mod_base = OTHER; note = 2'-O-methylguanosine-3'-phosphate
  modified_base 4: mod_base = OTHER; note = 2'-deoxy-2'-fluoroguanosine-3'-phosphate
  modified_base 5: mod_base = OTHER; note = 2'-O-methyladenosine-3'-phosphate
  modified_base 6: mod_base = OTHER; note = 2'-deoxy-2'-fluoroadenosine-3'-phosphate
  modified_base 7: mod_base = OTHER; note = 2'-O-methyluridine-3'-phosphate
  modified_base 8: mod_base = OTHER; note = 2'-deoxy-2'-fluoroadenosine-3'-phosphate
  modified_base 9: mod_base = OTHER; note = 2'-O-methylcytidine-3'-phosphate
  modified_base 10: mod_base = OTHER; note = 2'-deoxy-2'-fluorouridine-3'-phosphate
  modified_base 11: mod_base = OTHER; note = 2'-O-methylcytidine-3'-phosphate
  modified_base 12: mod_base = OTHER; note = 2'-deoxy-2'-fluorouridine-3'-phosphate
  modified_base 13: mod_base = OTHER; note = 2'-deoxy-2'-fluorouridine-3'-phosphate
  modified_base 14: mod_base = OTHER; note = 2'-deoxy-2'-fluoroguanosine-3'-phosphate
  modified_base 15: mod_base = OTHER; note = 2'-O-methylguanosine-3'-phosphate
  modified_base 16: mod_base = OTHER; note = 2'-deoxy-2'-fluorouridine-3'-phosphate
  modified_base 17: mod_base = OTHER; note = 2'-O-methyluridine-3'-phosphate
  modified_base 18: mod_base = OTHER; note = 2'-deoxy-2'-fluoroadenosine-3'-phosphate
  modified_base 19: mod_base = OTHER; note = 2'-O-methylcytidine-3'-phosphate
  modified_base 20: mod_base = OTHER; note = 2'-O-methyladenosine-3'-phosphate
  modified_base 21: mod_base = OTHER; note = 2'-O-methyluridine-3'-phosphorothioate
  modified_base 22: mod_base = OTHER; note = 2'-deoxy-2'-fluoroguanosine-3'-phosphorothioate
  modified_base 23: mod_base = OTHER; note = 2'-O-methyladenosine
atggaatactcttggttacatga

SEQ ID NO: 570 - RNA, 23 nt, synthetic construct
  source 1..23: mol_type = other RNA
  modified_base 1: mod_base = OTHER; note = 2'-O-methyladenosine-3'-phosphate
  modified_base 2: mod_base = OTHER; note = 2'-deoxy-2'-fluorouridine-3'-phosphate
  modified_base 3: mod_base = OTHER; note = 2'-O-methylguanosine-3'-phosphate
  modified_base 4: mod_base = OTHER; note = 2'-deoxy-2'-fluoroguanosine-3'-phosphate
  modified_base 5: mod_base = OTHER; note = 2'-O-methyladenosine-3'-phosphate
  modified_base 6: mod_base = OTHER; note = 2'-deoxy-2'-fluoroadenosine-3'-phosphate
  modified_base 7: mod_base = OTHER; note = 2'-O-methyluridine-3'-phosphate
  modified_base 8: mod_base = OTHER; note = 2'-deoxy-2'-fluoroadenosine-3'-phosphate
  modified_base 9: mod_base = OTHER; note = 2'-O-methylcytidine-3'-phosphate
  modified_base 10: mod_base = OTHER; note = 2'-deoxy-2'-fluorouridine-3'-phosphate
  modified_base 11: mod_base = OTHER; note = 2'-O-methylcytidine-3'-phosphate
  modified_base 12: mod_base = OTHER; note = 2'-deoxy-2'-fluorouridine-3'-phosphate
  modified_base 13: mod_base = OTHER; note = 2'-deoxy-2'-fluorouridine-3'-phosphate
  modified_base 14: mod_base = OTHER; note = 2'-deoxy-2'-fluoroguanosine-3'-phosphate
  modified_base 15: mod_base = OTHER; note = 2'-O-methylguanosine-3'-phosphate
  modified_base 16: mod_base = OTHER; note = 2'-deoxy-2'-fluorouridine-3'-phosphate
  modified_base 17: mod_base = OTHER; note = 2'-O-methyluridine-3'-phosphate
  modified_base 18: mod_base = OTHER; note = 2'-O-methyladenosine-3'-phosphate
  modified_base 19: mod_base = OTHER; note = 2'-O-methylcytidine-3'-phosphate
  modified_base 20: mod_base = OTHER; note = 2'-deoxy-2'-fluoroadenosine-3'-phosphate
  modified_base 21: mod_base = OTHER; note = 2'-O-methyluridine-3'-phosphorothioate
  modified_base 22: mod_base = OTHER; note = 2'-deoxy-2'-fluoroguanosine-3'-phosphorothioate
  modified_base 23: mod_base = OTHER; note = 2'-O-methyladenosine
atggaatactcttggttacatga

SEQ ID NO: 571 - RNA, 23 nt, synthetic construct
  source 1..23: mol_type = other RNA
  modified_base 1: mod_base = OTHER; note = 2'-O-methyladenosine-3'-phosphate
  modified_base 2: mod_base = OTHER; note = 2'-deoxy-2'-fluorouridine-3'-phosphate
  modified_base 3: mod_base = OTHER; note = 2'-O-methylguanosine-3'-phosphate
  modified_base 4: mod_base = OTHER; note = 2'-deoxy-2'-fluoroguanosine-3'-phosphate
  modified_base 5: mod_base = OTHER; note = 2'-O-methyladenosine-3'-phosphate
  modified_base 6: mod_base = OTHER; note = 2'-deoxy-2'-fluoroadenosine-3'-phosphate
  modified_base 7: mod_base = OTHER; note = 2'-O-methyluridine-3'-phosphate
  modified_base 8: mod_base = OTHER; note = 2'-deoxy-2'-fluoroadenosine-3'-phosphate
  modified_base 9: mod_base = OTHER; note = 2'-O-methylcytidine-3'-phosphate
  modified_base 10: mod_base = OTHER; note = 2'-deoxy-2'-fluorouridine-3'-phosphate
  modified_base 11: mod_base = OTHER; note = 2'-O-methylcytidine-3'-phosphate
  modified_base 12: mod_base = OTHER; note = 2'-deoxy-2'-fluorouridine-3'-phosphate
  modified_base 13: mod_base = OTHER; note = 2'-O-methyluridine-3'-phosphate
  modified_base 14: mod_base = OTHER; note = 2'-deoxy-2'-fluoroguanosine-3'-phosphate
  modified_base 15: mod_base = OTHER; note = 2'-O-methylguanosine-3'-phosphate
  modified_base 16: mod_base = OTHER; note = 2'-deoxy-2'-fluorouridine-3'-phosphate
  modified_base 17: mod_base = OTHER; note = 2'-O-methyluridine-3'-phosphate
  modified_base 18: mod_base = OTHER; note = 2'-deoxy-2'-fluoroadenosine-3'-phosphate
  modified_base 19: mod_base = OTHER; note = 2'-deoxy-2'-fluorocytidine-3'-phosphate
  modified_base 20: mod_base = OTHER; note = 2'-deoxy-2'-fluoroadenosine-3'-phosphate
  modified_base 21: mod_base = OTHER; note = 2'-O-methyluridine-3'-phosphorothioate
  modified_base 22: mod_base = OTHER; note = 2'-deoxy-2'-fluoroguanosine-3'-phosphorothioate
  modified_base 23: mod_base = OTHER; note = 2'-O-methyladenosine
atggaatactcttggttacatga

SEQ ID NO: 572 - RNA, 23 nt, synthetic construct
  source 1..23: mol_type = other RNA
  modified_base 1: mod_base = OTHER; note = 2'-O-methyladenosine-3'-phosphate
  modified_base 2: mod_base = OTHER; note = 2'-deoxy-2'-fluorouridine-3'-phosphate
  modified_base 3: mod_base = OTHER; note = 2'-deoxy-2'-fluoroguanosine-3'-phosphate
  modified_base 4: mod_base = OTHER; note = 2'-deoxy-2'-fluoroguanosine-3'-phosphate
  modified_base 5: mod_base = OTHER; note = 2'-O-methyladenosine-3'-phosphate
  modified_base 6: mod_base = OTHER; note = 2'-deoxy-2'-fluoroadenosine-3'-phosphate
  modified_base 7: mod_base = OTHER; note = 2'-O-methyluridine-3'-phosphate
  modified_base 8: mod_base = OTHER; note = 2'-deoxy-2'-fluoroadenosine-3'-phosphate
  modified_base 9: mod_base = OTHER; note = 2'-O-methylcytidine-3'-phosphate
  modified_base 10: mod_base = OTHER; note = 2'-deoxy-2'-fluorouridine-3'-phosphate
  modified_base 11: mod_base = OTHER; note = 2'-O-methylcytidine-3'-phosphate
  modified_base 12: mod_base = OTHER; note = 2'-deoxy-2'-fluorouridine-3'-phosphate
  modified_base 13: mod_base = OTHER; note = 2'-O-methyluridine-3'-phosphate
  modified_base 14: mod_base = OTHER; note = 2'-deoxy-2'-fluoroguanosine-3'-phosphate
  modified_base 15: mod_base = OTHER; note = 2'-O-methylguanosine-3'-phosphate
  modified_base 16: mod_base = OTHER; note = 2'-deoxy-2'-fluorouridine-3'-phosphate
  modified_base 17: mod_base = OTHER; note = 2'-O-methyluridine-3'-phosphate
  modified_base 18: mod_base = OTHER; note = 2'-deoxy-2'-fluoroadenosine-3'-phosphate
  modified_base 19: mod_base = OTHER; note = 2'-O-methylcytidine-3'-phosphate
  modified_base 20: mod_base = OTHER; note = 2'-deoxy-2'-fluoroadenosine-3'-phosphate
  modified_base 21: mod_base = OTHER; note = 2'-O-methyluridine-3'-phosphorothioate
  modified_base 22: mod_base = OTHER; note = 2'-deoxy-2'-fluoroguanosine-3'-phosphorothioate
  modified_base 23: mod_base = OTHER; note = 2'-O-methyladenosine
atggaatactcttggttacatga

SEQ ID NO: 573 - RNA, 23 nt, synthetic construct
  source 1..23: mol_type = other RNA
  modified_base 1: mod_base = OTHER; note = 2'-O-methyladenosine-3'-phosphate
  modified_base 2: mod_base = OTHER; note = 2'-deoxy-2'-fluorouridine-3'-phosphate
  modified_base 3: mod_base = OTHER; note = 2'-O-methylguanosine-3'-phosphate
  modified_base 4: mod_base = OTHER; note = 2'-deoxy-2'-fluoroguanosine-3'-phosphate
  modified_base 5: mod_base = OTHER; note = 2'-O-methyladenosine-3'-phosphate
  modified_base 6: mod_base = OTHER; note = 2'-deoxy-2'-fluoroadenosine-3'-phosphate
  modified_base 7: mod_base = OTHER; note = 2'-O-methyluridine-3'-phosphate
  modified_base 8: mod_base = OTHER; note = 2'-deoxy-2'-fluoroadenosine-3'-phosphate
  modified_base 9: mod_base = OTHER; note = 2'-O-methylcytidine-3'-phosphate
  modified_base 10: mod_base = OTHER; note = 2'-deoxy-2'-fluorouridine-3'-phosphate
  modified_base 11: mod_base = OTHER; note = 2'-O-methylcytidine-3'-phosphate
  modified_base 12: mod_base = OTHER; note = 2'-deoxy-2'-fluorouridine-3'-phosphate
  modified_base 13: mod_base = OTHER; note = 2'-O-methyluridine-3'-phosphate
  modified_base 14: mod_base = OTHER; note = 2'-deoxy-2'-fluoroguanosine-3'-phosphate
  modified_base 15: mod_base = OTHER; note = 2'-deoxy-2'-fluoroguanosine-3'-phosphate
  modified_base 16: mod_base = OTHER; note = 2'-deoxy-2'-fluorouridine-3'-phosphate
  modified_base 17: mod_base = OTHER; note = 2'-O-methyluridine-3'-phosphate
  modified_base 18: mod_base = OTHER; note = 2'-deoxy-2'-fluoroadenosine-3'-phosphate
  modified_base 19: mod_base = OTHER; note = 2'-O-methylcytidine-3'-phosphate
  modified_base 20: mod_base = OTHER; note = 2'-O-methyladenosine-3'-phosphate
  modified_base 21: mod_base = OTHER; note = 2'-O-methyluridine-3'-phosphorothioate
  modified_base 22: mod_base = OTHER; note = 2'-deoxy-2'-fluoroguanosine-3'-phosphorothioate
  modified_base 23: mod_base = OTHER; note = 2'-O-methyladenosine
atggaatactcttggttacatga

SEQ ID NO: 574 - RNA, 23 nt, synthetic construct
  source 1..23: mol_type = other RNA
  modified_base 1: mod_base = OTHER; note = 2'-O-methyladenosine-3'-phosphate
  modified_base 2: mod_base = OTHER; note = 2'-deoxy-2'-fluorouridine-3'-phosphate
  modified_base 3: mod_base = OTHER; note = 2'-O-methylguanosine-3'-phosphate
  modified_base 4: mod_base = OTHER; note = 2'-deoxy-2'-fluoroguanosine-3'-phosphate
  modified_base 5: mod_base = OTHER; note = 2'-deoxy-2'-fluoroadenosine-3'-phosphate
  modified_base 6: mod_base = OTHER; note = 2'-deoxy-2'-fluoroadenosine-3'-phosphate
  modified_base 7: mod_base = OTHER; note = 2'-O-methyluridine-3'-phosphate
  modified_base 8: mod_base = OTHER; note = 2'-deoxy-2'-fluoroadenosine-3'-phosphate
  modified_base 9: mod_base = OTHER; note = 2'-O-methylcytidine-3'-phosphate
  modified_base 10: mod_base = OTHER; note = 2'-deoxy-2'-fluorouridine-3'-phosphate
  modified_base 11: mod_base = OTHER; note = 2'-O-methylcytidine-3'-phosphate
  modified_base 12: mod_base = OTHER; note = 2'-deoxy-2'-fluorouridine-3'-phosphate
  modified_base 13: mod_base = OTHER; note = 2'-O-methyluridine-3'-phosphate
  modified_base 14: mod_base = OTHER; note = 2'-deoxy-2'-fluoroguanosine-3'-phosphate
  modified_base 15: mod_base = OTHER; note = 2'-O-methylguanosine-3'-phosphate
  modified_base 16: mod_base = OTHER; note = 2'-O-methyluridine-3'-phosphate
  modified_base 17: mod_base = OTHER; note = 2'-O-methyluridine-3'-phosphate
  modified_base 18: mod_base = OTHER; note = 2'-deoxy-2'-fluoroadenosine-3'-phosphate
  modified_base 19: mod_base = OTHER; note = 2'-O-methylcytidine-3'-phosphate
  modified_base 20: mod_base = OTHER; note = 2'-deoxy-2'-fluoroadenosine-3'-phosphate
  modified_base 21: mod_base = OTHER; note = 2'-O-methyluridine-3'-phosphorothioate
  modified_base 22: mod_base = OTHER; note = 2'-deoxy-2'-fluoroguanosine-3'-phosphorothioate
  modified_base 23: mod_base = OTHER; note = 2'-O-methyladenosine
atggaatactcttggttacatga

SEQ ID NO: 575 - RNA, 23 nt, synthetic construct
  source 1..23: mol_type = other RNA
  modified_base 1: mod_base = OTHER; note = 2'-O-methyladenosine-3'-phosphate
  modified_base 2: mod_base = OTHER; note = 2'-deoxy-2'-fluorouridine-3'-phosphate
  modified_base 3: mod_base = OTHER; note = 2'-O-methylguanosine-3'-phosphate
  modified_base 4: mod_base = OTHER; note = 2'-deoxy-2'-fluoroguanosine-3'-phosphate
  modified_base 5: mod_base = OTHER; note = 2'-O-methyladenosine-3'-phosphate
  modified_base 6: mod_base = OTHER; note = 2'-deoxy-2'-fluoroadenosine-3'-phosphate
  modified_base 7: mod_base = OTHER; note = 2'-O-methyluridine-3'-phosphate
  modified_base 8: mod_base = OTHER; note = 2'-deoxy-2'-fluoroadenosine-3'-phosphate
  modified_base 9: mod_base = OTHER; note = 2'-O-methylcytidine-3'-phosphate
  modified_base 10: mod_base = OTHER; note = 2'-deoxy-2'-fluorouridine-3'-phosphate
  modified_base 11: mod_base = OTHER; note = 2'-O-methylcytidine-3'-phosphate
  modified_base 12: mod_base = OTHER; note = 2'-deoxy-2'-fluorouridine-3'-phosphate
  modified_base 13: mod_base = OTHER; note = 2'-O-methyluridine-3'-phosphate
  modified_base 14: mod_base = OTHER; note = 2'-deoxy-2'-fluoroguanosine-3'-phosphate
  modified_base 15: mod_base = OTHER; note = 2'-O-methylguanosine-3'-phosphate
  modified_base 16: mod_base = OTHER; note = 2'-deoxy-2'-fluorouridine-3'-phosphate
  modified_base 17: mod_base = OTHER; note = 2'-deoxy-2'-fluorouridine-3'-phosphate
  modified_base 18: mod_base = OTHER; note = 2'-deoxy-2'-fluoroadenosine-3'-phosphate
  modified_base 19: mod_base = OTHER; note = 2'-O-methylcytidine-3'-phosphate
  modified_base 20: mod_base = OTHER; note = 2'-deoxy-2'-fluoroadenosine-3'-phosphate
  modified_base 21: mod_base = OTHER; note = 2'-O-methyluridine-3'-phosphorothioate
  modified_base 22: mod_base = OTHER; note = 2'-deoxy-2'-fluoroguanosine-3'-phosphorothioate
  modified_base 23: mod_base = OTHER; note = 2'-O-methyladenosine
atggaatactcttggttacatga

SEQ ID NO: 576 - RNA, 23 nt, synthetic construct
  source 1..23: mol_type = other RNA
  modified_base 1: mod_base = OTHER; note = 2'-O-methyladenosine-3'-phosphate
  modified_base 2: mod_base = OTHER; note = 2'-deoxy-2'-fluorouridine-3'-phosphate
  modified_base 3: mod_base = OTHER; note = 2'-O-methylguanosine-3'-phosphate
  modified_base 4: mod_base = OTHER; note = 2'-deoxy-2'-fluoroguanosine-3'-phosphate
  modified_base 5: mod_base = OTHER; note = 2'-O-methyladenosine-3'-phosphate
  modified_base 6: mod_base = OTHER; note = 2'-deoxy-2'-fluoroadenosine-3'-phosphate
  modified_base 7: mod_base = OTHER; note = 2'-O-methyluridine-3'-phosphate
  modified_base 8: mod_base = OTHER; note = 2'-deoxy-2'-fluoroadenosine-3'-phosphate
  modified_base 9: mod_base = OTHER; note = 2'-O-methylcytidine-3'-phosphate
  modified_base 10: mod_base = OTHER; note = 2'-deoxy-2'-fluorouridine-3'-phosphate
  modified_base 11: mod_base = OTHER; note = 2'-O-methylcytidine-3'-phosphate
  modified_base 12: mod_base = OTHER; note = 2'-deoxy-2'-fluorouridine-3'-phosphate
  modified_base 13: mod_base = OTHER; note = 2'-O-methyluridine-3'-phosphate
  modified_base 14: mod_base = OTHER; note = 2'-deoxy-2'-fluoroguanosine-3'-phosphate
  modified_base 15: mod_base = OTHER; note = 2'-O-methylguanosine-3'-phosphate
  modified_base 16: mod_base = OTHER; note = 2'-deoxy-2'-fluorouridine-3'-phosphate
  modified_base 17: mod_base = OTHER; note = 2'-deoxy-2'-fluorouridine-3'-phosphate
  modified_base 18: mod_base = OTHER; note = 2'-deoxy-2'-fluoroadenosine-3'-phosphate
  modified_base 19: mod_base = OTHER; note = 2'-O-methylcytidine-3'-phosphate
  modified_base 20: mod_base = OTHER; note = 2'-O-methyladenosine-3'-phosphate
  modified_base 21: mod_base = OTHER; note = 2'-O-methyluridine-3'-phosphorothioate
  modified_base 22: mod_base = OTHER; note = 2'-deoxy-2'-fluoroguanosine-3'-phosphorothioate
  modified_base 23: mod_base = OTHER; note = 2'-O-methyladenosine
atggaatactcttggttacatga

SEQ ID NO: 577 - RNA, 23 nt, synthetic construct
  source 1..23: mol_type = other RNA
  modified_base 1: mod_base = OTHER; note = 2'-O-methyladenosine-3'-phosphate
  modified_base 2: mod_base = OTHER; note = 2'-deoxy-2'-fluorouridine-3'-phosphate
  modified_base 3: mod_base = OTHER; note = 2'-O-methylguanosine-3'-phosphate
  modified_base 4: mod_base = OTHER; note = 2'-deoxy-2'-fluoroguanosine-3'-phosphate
  modified_base 5: mod_base = OTHER; note = 2'-O-methyladenosine-3'-phosphate
  modified_base 6: mod_base = OTHER; note = 2'-deoxy-2'-fluoroadenosine-3'-phosphate
  modified_base 7: mod_base = OTHER; note = 2'-O-methyluridine-3'-phosphate
  modified_base 8: mod_base = OTHER; note = 2'-deoxy-2'-fluoroadenosine-3'-phosphate
  modified_base 9: mod_base = OTHER; note = 2'-O-methylcytidine-3'-phosphate
  modified_base 10: mod_base = OTHER; note = 2'-deoxy-2'-fluorouridine-3'-phosphate
  modified_base 11: mod_base = OTHER; note = 2'-O-methylcytidine-3'-phosphate
  modified_base 12: mod_base = OTHER; note = 2'-deoxy-2'-fluorouridine-3'-phosphate
  modified_base 13: mod_base = OTHER; note = 2'-O-methyluridine-3'-phosphate
  modified_base 14: mod_base = OTHER; note = 2'-deoxy-2'-fluoroguanosine-3'-phosphate
  modified_base 15: mod_base = OTHER; note = 2'-O-methylguanosine-3'-phosphate
  modified_base 16: mod_base = OTHER; note = 2'-deoxy-2'-fluorouridine-3'-phosphate
  modified_base 17: mod_base = OTHER; note = 2'-O-methyluridine-3'-phosphate
  modified_base 18: mod_base = OTHER; note = 2'-O-methyladenosine-3'-phosphate
  modified_base 19: mod_base = OTHER; note = 2'-O-methylcytidine-3'-phosphate
  modified_base 20: mod_base = OTHER; note = 2'-deoxy-2'-fluoroadenosine-3'-phosphate
  modified_base 21: mod_base = OTHER; note = 2'-deoxy-2'-fluorouridine-3'-phosphorothioate
  modified_base 22: mod_base = OTHER; note = 2'-deoxy-2'-fluoroguanosine-3'-phosphorothioate
  modified_base 23: mod_base = OTHER; note = 2'-O-methyladenosine
atggaatactcttggttacatga

SEQ ID NO: 578 - RNA, 23 nt, synthetic construct
  source 1..23: mol_type = other RNA
  modified_base 1: mod_base = OTHER; note = 2'-O-methyladenosine-3'-phosphate
  modified_base 2: mod_base = OTHER; note = 2'-deoxy-2'-fluorouridine-3'-phosphate
  modified_base 3: mod_base = OTHER; note = 2'-deoxy-2'-fluoroguanosine-3'-phosphate
  modified_base 4: mod_base = OTHER; note = 2'-deoxy-2'-fluoroguanosine-3'-phosphate
  modified_base 5: mod_base = OTHER; note = 2'-O-methyladenosine-3'-phosphate
  modified_base 6: mod_base = OTHER; note = 2'-deoxy-2'-fluoroadenosine-3'-phosphate
  modified_base 7: mod_base = OTHER; note = 2'-O-methyluridine-3'-phosphate
  modified_base 8: mod_base = OTHER; note = 2'-deoxy-2'-fluoroadenosine-3'-phosphate
  modified_base 9: mod_base = OTHER; note = 2'-O-methylcytidine-3'-phosphate
  modified_base 10: mod_base = OTHER; note = 2'-deoxy-2'-fluorouridine-3'-phosphate
  modified_base 11: mod_base = OTHER; note = 2'-O-methylcytidine-3'-phosphate
  modified_base 12: mod_base = OTHER; note = 2'-deoxy-2'-fluorouridine-3'-phosphate
  modified_base 13: mod_base = OTHER; note = 2'-O-methyluridine-3'-phosphate
  modified_base 14: mod_base = OTHER; note = 2'-deoxy-2'-fluoroguanosine-3'-phosphate
  modified_base 15: mod_base = OTHER; note = 2'-O-methylguanosine-3'-phosphate
  modified_base 16: mod_base = OTHER; note = 2'-O-methyluridine-3'-phosphate
  modified_base 17: mod_base = OTHER; note = 2'-O-methyluridine-3'-phosphate
  modified_base 18: mod_base = OTHER; note = 2'-deoxy-2'-fluoroadenosine-3'-phosphate
  modified_base 19: mod_base = OTHER; note = 2'-O-methylcytidine-3'-phosphate
  modified_base 20: mod_base = OTHER; note = 2'-deoxy-2'-fluoroadenosine-3'-phosphate
  modified_base 21: mod_base = OTHER; note = 2'-O-methyluridine-3'-phosphorothioate
  modified_base 22: mod_base = OTHER; note = 2'-deoxy-2'-fluoroguanosine-3'-phosphorothioate
  modified_base 23: mod_base = OTHER; note = 2'-O-methyladenosine
atggaatactcttggttacatga

SEQ ID NO: 579 - RNA, 23 nt, synthetic construct
  source 1..23: mol_type = other RNA
  modified_base 1: mod_base = OTHER; note = 2'-O-methyluridine-3'-phosphate
  modified_base 2: mod_base = OTHER; note = 2'-deoxy-2'-fluorocytidine-3'-phosphate
  modified_base 3: mod_base = OTHER; note = 2'-O-methyluridine-3'-phosphate
  modified_base 4: mod_base = OTHER; note = 2'-deoxy-2'-fluorouridine-3'-phosphate
  modified_base 5: mod_base = OTHER; note = 2'-O-methylguanosine-3'-phosphate
  modified_base 6: mod_base = OTHER; note = 2'-deoxy-2'-fluoroguanosine-3'-phosphate
  modified_base 7: mod_base = OTHER; note = 2'-O-methyluridine-3'-phosphate
  modified_base 8: mod_base = OTHER; note = 2'-deoxy-2'-fluorouridine-3'-phosphate
  modified_base 9: mod_base = OTHER; note = 2'-O-methyladenosine-3'-phosphate
  modified_base 10: mod_base = OTHER; note = 2'-deoxy-2'-fluorocytidine-3'-phosphate
  modified_base 11: mod_base = OTHER; note = 2'-O-methyladenosine-3'-phosphate
  modified_base 12: mod_base = OTHER; note = 2'-deoxy-2'-fluorouridine-3'-phosphate
  modified_base 13: mod_base = OTHER; note = 2'-O-methylguanosine-3'-phosphate
  modified_base 14: mod_base = OTHER; note = 2'-deoxy-2'-fluoroadenosine-3'-phosphate
  modified_base 15: mod_base = OTHER; note = 2'-O-methyladenosine-3'-phosphate
  modified_base 16: mod_base = OTHER; note = 2'-deoxy-2'-fluoroadenosine-3'-phosphate
  modified_base 17: mod_base = OTHER; note = 2'-O-methyluridine-3'-phosphate
  modified_base 18: mod_base = OTHER; note = 2'-deoxy-2'-fluorocytidine-3'-phosphate
  modified_base 19: mod_base = OTHER; note = 2'-O-methylcytidine-3'-phosphate
  modified_base 20: mod_base = OTHER; note = 2'-deoxy-2'-fluorocytidine-3'-phosphate
  modified_base 21: mod_base = OTHER; note = 2'-O-methyladenosine-3'-phosphorothioate
  modified_base 22: mod_base = OTHER; note = 2'-deoxy-2'-fluorouridine-3'-phosphorothioate
  modified_base 23: mod_base = OTHER; note = 2'-O-methylcytidine
tcttggttacatgaaatcccatc

SEQ ID NO: 580 - RNA, 23 nt, synthetic construct
  source 1..23: mol_type = other RNA
  modified_base 1: mod_base = OTHER; note = 2'-O-methyluridine-3'-phosphate
  modified_base 2: mod_base = OTHER; note = 2'-deoxy-2'-fluorocytidine-3'-phosphate
  modified_base 3: mod_base = OTHER; note = 2'-O-methyluridine-3'-phosphate
  modified_base 4: mod_base = OTHER; note = 2'-deoxy-2'-fluorouridine-3'-phosphate
  modified_base 5: mod_base = OTHER; note = 2'-O-methylguanosine-3'-phosphate
  modified_base 6: mod_base = OTHER; note = 2'-deoxy-2'-fluoroguanosine-3'-phosphate
  modified_base 7: mod_base = OTHER; note = 2'-O-methyluridine-3'-phosphate
  modified_base 8: mod_base = OTHER; note = 2'-O-methyluridine-3'-phosphate
  modified_base 9: mod_base = OTHER; note = 2'-O-methyladenosine-3'-phosphate
  modified_base 10: mod_base = OTHER; note = 2'-deoxy-2'-fluorocytidine-3'-phosphate
  modified_base 11: mod_base = OTHER; note = 2'-O-methyladenosine-3'-phosphate
  modified_base 12: mod_base = OTHER; note = 2'-deoxy-2'-fluorouridine-3'-phosphate
  modified_base 13: mod_base = OTHER; note = 2'-O-methylguanosine-3'-phosphate
  modified_base 14: mod_base = OTHER; note = 2'-deoxy-2'-fluoroadenosine-3'-phosphate
  modified_base 15: mod_base = OTHER; note = 2'-deoxy-2'-fluoroadenosine-3'-phosphate
  modified_base 16: mod_base = OTHER; note = 2'-deoxy-2'-fluoroadenosine-3'-phosphate
  modified_base 17: mod_base = OTHER; note = 2'-O-methyluridine-3'-phosphate
  modified_base 18: mod_base = OTHER; note = 2'-O-methylcytidine-3'-phosphate
  modified_base 19: mod_base = OTHER; note = 2'-O-methylcytidine-3'-phosphate
  modified_base 20: mod_base = OTHER; note = 2'-deoxy-2'-fluorocytidine-3'-phosphate
  modified_base 21: mod_base = OTHER; note = 2'-O-methyladenosine-3'-phosphorothioate
  modified_base 22: mod_base = OTHER; note = 2'-deoxy-2'-fluorouridine-3'-phosphorothioate
  modified_base 23: mod_base = OTHER; note = 2'-O-methylcytidine
tcttggttacatgaaatcccatc

SEQ ID NO: 581 - RNA, 23 nt, synthetic construct
  source 1..23: mol_type = other RNA
  modified_base 1: mod_base = OTHER; note = 2'-O-methyluridine-3'-phosphate
  modified_base 2: mod_base = OTHER; note = 2'-deoxy-2'-fluorocytidine-3'-phosphate
  modified_base 3: mod_base = OTHER; note = 2'-O-methyluridine-3'-phosphate
  modified_base 4: mod_base = OTHER; note = 2'-deoxy-2'-fluorouridine-3'-phosphate
  modified_base 5: mod_base = OTHER; note = 2'-O-methylguanosine-3'-phosphate
  modified_base 6: mod_base = OTHER; note = 2'-deoxy-2'-fluoroguanosine-3'-phosphate
  modified_base 7: mod_base = OTHER; note = 2'-O-methyluridine-3'-phosphate
  modified_base 8: mod_base = OTHER; note = 2'-deoxy-2'-fluorouridine-3'-phosphate
  modified_base 9: mod_base = OTHER; note = 2'-O-methyladenosine-3'-phosphate
  modified_base 10: mod_base = OTHER; note = 2'-O-methylcytidine-3'-phosphate
  modified_base 11: mod_base = OTHER; note = 2'-O-methyladenosine-3'-phosphate
  modified_base 12: mod_base = OTHER; note = 2'-deoxy-2'-fluorouridine-3'-phosphate
  modified_base 13: mod_base = OTHER; note = 2'-O-methylguanosine-3'-phosphate
  modified_base 14: mod_base = OTHER; note = 2'-deoxy-2'-fluoroadenosine-3'-phosphate
  modified_base 15: mod_base = OTHER; note = 2'-deoxy-2'-fluoroadenosine-3'-phosphate
  modified_base 16: mod_base = OTHER; note = 2'-deoxy-2'-fluoroadenosine-3'-phosphate
  modified_base 17: mod_base = OTHER; note = 2'-O-methyluridine-3'-phosphate
  modified_base 18: mod_base = OTHER; note = 2'-deoxy-2'-fluorocytidine-3'-phosphate
  modified_base 19: mod_base = OTHER; note = 2'-O-methylcytidine-3'-phosphate
  modified_base 20: mod_base = OTHER; note = 2'-deoxy-2'-fluorocytidine-3'-phosphate
  modified_base 21: mod_base = OTHER; note = 2'-O-methyladenosine-3'-phosphorothioate
  modified_base 22: mod_base = OTHER; note = 2'-deoxy-2'-fluorouridine-3'-phosphorothioate
  modified_base 23: mod_base = OTHER; note = 2'-O-methylcytidine
tcttggttacatgaaatcccatc

SEQ ID NO: 582 - RNA, 23 nt, synthetic construct
  source 1..23: mol_type = other RNA
  modified_base 1: mod_base = OTHER; note = 2'-O-methyluridine-3'-phosphate
  modified_base 2: mod_base = OTHER; note = 2'-deoxy-2'-fluorocytidine-3'-phosphate
  modified_base 3: mod_base = OTHER; note = 2'-O-methyluridine-3'-phosphate
  modified_base 4: mod_base = OTHER; note = 2'-deoxy-2'-fluorouridine-3'-phosphate
  modified_base 5: mod_base = OTHER; note = 2'-O-methylguanosine-3'-phosphate
  modified_base 6: mod_base = OTHER; note = 2'-deoxy-2'-fluoroguanosine-3'-phosphate
  modified_base 7: mod_base = OTHER; note = 2'-O-methyluridine-3'-phosphate
  modified_base 8: mod_base = OTHER; note = 2'-O-methyluridine-3'-phosphate
  modified_base 9: mod_base = OTHER; note = 2'-O-methyladenosine-3'-phosphate
  modified_base 10: mod_base = OTHER; note = 2'-deoxy-2'-fluorocytidine-3'-phosphate
  modified_base 11: mod_base = OTHER; note = 2'-O-methyladenosine-3'-phosphate
  modified_base 12: mod_base = OTHER; note = 2'-deoxy-2'-fluorouridine-3'-phosphate
  modified_base 13: mod_base = OTHER; note = 2'-O-methylguanosine-3'-phosphate
  modified_base 14: mod_base = OTHER; note = 2'-deoxy-2'-fluoroadenosine-3'-phosphate
  modified_base 15: mod_base = OTHER; note = 2'-O-methyladenosine-3'-phosphate
  modified_base 16: mod_base = OTHER; note = 2'-deoxy-2'-fluoroadenosine-3'-phosphate
  modified_base 17: mod_base = OTHER; note = 2'-O-methyluridine-3'-phosphate
  modified_base 18: mod_base = OTHER; note = 2'-deoxy-2'-fluorocytidine-3'-phosphate
  modified_base 19: mod_base = OTHER; note = 2'-O-methylcytidine-3'-phosphate
  modified_base 20: mod_base = OTHER; note = 2'-deoxy-2'-fluorocytidine-3'-phosphate
  modified_base 21: mod_base = OTHER; note = 2'-O-methyladenosine-3'-phosphorothioate
  modified_base 22: mod_base = OTHER; note = 2'-deoxy-2'-fluorouridine-3'-phosphorothioate
  modified_base 23: mod_base = OTHER; note = 2'-O-methylcytidine
tcttggttacatgaaatcccatc

SEQ ID NO: 583 - RNA, 23 nt, synthetic construct
  source 1..23: mol_type = other RNA
  modified_base 1: mod_base = OTHER; note = 2'-O-methyluridine-3'-phosphate
  modified_base 2: mod_base = OTHER; note = 2'-deoxy-2'-fluorocytidine-3'-phosphate
  modified_base 3: mod_base = OTHER; note = 2'-O-methyluridine-3'-phosphate
  modified_base 4: mod_base = OTHER; note = 2'-deoxy-2'-fluorouridine-3'-phosphate
  modified_base 5: mod_base = OTHER; note = 2'-O-methylguanosine-3'-phosphate
  modified_base 6: mod_base = OTHER; note = 2'-deoxy-2'-fluoroguanosine-3'-phosphate
  modified_base 7: mod_base = OTHER; note = 2'-O-methyluridine-3'-phosphate
  modified_base 8: mod_base = OTHER; note = 2'-O-methyluridine-3'-phosphate
  modified_base 9: mod_base = OTHER; note = 2'-O-methyladenosine-3'-phosphate
  modified_base 10: mod_base = OTHER; note = 2'-deoxy-2'-fluorocytidine-3'-phosphate
  modified_base 11: mod_base = OTHER; note = 2'-O-methyladenosine-3'-phosphate
  modified_base 12: mod_base = OTHER; note = 2'-deoxy-2'-fluorouridine-3'-phosphate
  modified_base 13: mod_base = OTHER; note = 2'-O-methylguanosine-3'-phosphate
  modified_base 14: mod_base = OTHER; note = 2'-deoxy-2'-fluoroadenosine-3'-phosphate
  modified_base 15: mod_base = OTHER; note = 2'-deoxy-2'-fluoroadenosine-3'-phosphate
  modified_base 16: mod_base = OTHER; note = 2'-deoxy-2'-fluoroadenosine-3'-phosphate
  modified_base 17: mod_base = OTHER; note = 2'-O-methyluridine-3'-phosphate
  modified_base 18: mod_base = OTHER; note = 2'-deoxy-2'-fluorocytidine-3'-phosphate
  modified_base 19: mod_base = OTHER; note = 2'-O-methylcytidine-3'-phosphate
  modified_base 20: mod_base = OTHER; note = 2'-deoxy-2'-fluorocytidine-3'-phosphate
  modified_base 21: mod_base = OTHER; note = 2'-O-methyladenosine-3'-phosphorothioate
  modified_base 22: mod_base = OTHER; note = 2'-deoxy-2'-fluorouridine-3'-phosphorothioate
  modified_base 23: mod_base = OTHER; note = 2'-O-methylcytidine
tcttggttacatgaaatcccatc

SEQ ID NO: 584 - RNA, 23 nt, synthetic construct
  source 1..23: mol_type = other RNA
  modified_base 1: mod_base = OTHER; note = 2'-O-methyluridine-3'-phosphate
  modified_base 2: mod_base = OTHER; note = 2'-deoxy-2'-fluorocytidine-3'-phosphate
  modified_base 3: mod_base = OTHER; note = 2'-O-methyluridine-3'-phosphate
  modified_base 4: mod_base = OTHER; note = 2'-O-methyluridine-3'-phosphate
  modified_base 5: mod_base = OTHER; note = 2'-deoxy-2'-fluoroguanosine-3'-phosphate
  modified_base 6: mod_base = OTHER; note = 2'-deoxy-2'-fluoroguanosine-3'-phosphate
  modified_base 7: mod_base = OTHER; note = 2'-O-methyluridine-3'-phosphate
  modified_base 8: mod_base = OTHER; note = 2'-O-methyluridine-3'-phosphate
  modified_base 9: mod_base = OTHER; note = 2'-deoxy-2'-fluoroadenosine-3'-phosphate
  modified_base 10: mod_base = OTHER; note = 2'-O-methylcytidine-3'-phosphate
  modified_base 11: mod_base = OTHER; note = 2'-deoxy-2'-fluoroadenosine-3'-phosphate
  modified_base 12: mod_base = OTHER; note = 2'-O-methyluridine-3'-phosphate
  modified_base 14: mod_base = OTHER; note = 2'-O-methyladenosine-3'-phosphate
  modified_base 15: mod_base = OTHER; note = 2'-deoxy-2'-fluoroadenosine-3'-phosphate
  modified_base 16: mod_base = OTHER; note = 2'-O-methyladenosine-3'-phosphate
  modified_base 17: mod_base = OTHER; note = 2'-O-methyluridine-3'-phosphate
  modified_base 18: mod_base = OTHER; note = 2'-deoxy-2'-fluorocytidine-3'-phosphate
  modified_base 19: mod_base = OTHER; note = 2'-deoxy-2'-fluorocytidine-3'-phosphate
  modified_base 20: mod_base = OTHER; note = 2'-O-methylcytidine-3'-phosphate
  modified_base 21: mod_base = OTHER; note = 2'-O-methyladenosine-3'-phosphorothioate
  modified_base 22: mod_base = OTHER; note = 2'-deoxy-2'-fluorouridine-3'-phosphorothioate
  modified_base 23: mod_base = OTHER; note = 2'-O-methylcytidine
tcttggttacatgaaatcccatc

SEQ ID NO: 585 - RNA, 23 nt, synthetic construct
  source 1..23: mol_type = other RNA
  modified_base 1: mod_base = OTHER; note = 2'-O-methyluridine-3'-phosphate
  modified_base 2: mod_base = OTHER; note = 2'-deoxy-2'-fluorocytidine-3'-phosphate
  modified_base 3: mod_base = OTHER; note = 2'-O-methyluridine-3'-phosphate
  modified_base 4: mod_base = OTHER; note = 2'-deoxy-2'-fluorouridine-3'-phosphate
  modified_base 5: mod_base = OTHER; note = 2'-O-methylguanosine-3'-phosphate
  modified_base 6: mod_base = OTHER; note = 2'-deoxy-2'-fluoroguanosine-3'-phosphate
  modified_base 7: mod_base = OTHER; note = 2'-O-methyluridine-3'-phosphate
  modified_base 8: mod_base = OTHER; note = 2'-O-methyluridine-3'-phosphate
  modified_base 9: mod_base = OTHER; note = 2'-O-methyladenosine-3'-phosphate
  modified_base 10: mod_base = OTHER; note = 2'-deoxy-2'-fluorocytidine-3'-phosphate
  modified_base 11: mod_base = OTHER; note = 2'-O-methyladenosine-3'-phosphate
  modified_base 12: mod_base = OTHER; note = 2'-deoxy-2'-fluorouridine-3'-phosphate
  modified_base 13: mod_base = OTHER; note = 2'-O-methylguanosine-3'-phosphate
  modified_base 14: mod_base = OTHER; note = 2'-deoxy-2'-fluoroadenosine-3'-phosphate
  modified_base 15: mod_base = OTHER; note = 2'-deoxy-2'-fluoroadenosine-3'-phosphate
  modified_base 16: mod_base = OTHER; note = 2'-O-methyladenosine-3'-phosphate
  modified_base 17: mod_base = OTHER; note = 2'-O-methyluridine-3'-phosphate
  modified_base 18: mod_base = OTHER; note = 2'-deoxy-2'-fluorocytidine-3'-phosphate
  modified_base 19: mod_base = OTHER; note = 2'-deoxy-2'-fluorocytidine-3'-phosphate
  modified_base 20: mod_base = OTHER; note = 2'-O-methylcytidine-3'-phosphate
  modified_base 21: mod_base = OTHER; note = 2'-O-methyladenosine-3'-phosphorothioate
  modified_base 22: mod_base = OTHER; note = 2'-deoxy-2'-fluorouridine-3'-phosphorothioate
  modified_base 23: mod_base = OTHER; note = 2'-O-methylcytidine
tcttggttacatgaaatcccatc

SEQ ID NO: 586 - RNA, 23 nt, synthetic construct
  source 1..23: mol_type = other RNA
  modified_base 1: mod_base = OTHER; note = 2'-O-methyluridine-3'-phosphate
  modified_base 2: mod_base = OTHER; note = 2'-deoxy-2'-fluorocytidine-3'-phosphate
  modified_base 3: mod_base = OTHER; note = 2'-O-methyluridine-3'-phosphate
  modified_base 4: mod_base = OTHER; note = 2'-deoxy-2'-fluorouridine-3'-phosphate
  modified_base 5: mod_base = OTHER; note = 2'-O-methylguanosine-3'-phosphate
  modified_base 6: mod_base = OTHER; note = 2'-deoxy-2'-fluoroguanosine-3'-phosphate
  modified_base 7: mod_base = OTHER; note = 2'-O-methyluridine-3'-phosphate
  modified_base 8: mod_base = OTHER; note = 2'-deoxy-2'-fluorouridine-3'-phosphate
  modified_base 9: mod_base = OTHER; note = 2'-O-methyladenosine-3'-phosphate
  modified_base 10: mod_base = OTHER; note = 2'-O-methylcytidine-3'-phosphate
  modified_base 11: mod_base = OTHER; note = 2'-O-methyladenosine-3'-phosphate
  modified_base 12: mod_base = OTHER; note = 2'-deoxy-2'-fluorouridine-3'-phosphate
  modified_base 13: mod_base = OTHER; note = 2'-deoxy-2'-fluoroguanosine-3'-phosphate
  modified_base 14: mod_base = OTHER; note = 2'-deoxy-2'-fluoroadenosine-3'-phosphate
  modified_base 15: mod_base = OTHER; note = 2'-O-methyladenosine-3'-phosphate
  modified_base 16: mod_base = OTHER; note = 2'-deoxy-2'-fluoroadenosine-3'-phosphate
  modified_base 17: mod_base = OTHER; note = 2'-O-methyluridine-3'-phosphate
  modified_base 18: mod_base = OTHER; note = 2'-deoxy-2'-fluorocytidine-3'-phosphate
  modified_base 19: mod_base = OTHER; note = 2'-O-methylcytidine-3'-phosphate
  modified_base 20: mod_base = OTHER; note = 2'-deoxy-2'-fluorocytidine-3'-phosphate
  modified_base 21: mod_base = OTHER; note = 2'-O-methyladenosine-3'-phosphorothioate
  modified_base 22: mod_base = OTHER; note = 2'-deoxy-2'-fluorouridine-3'-phosphorothioate
  modified_base 23: mod_base = OTHER; note = 2'-O-methylcytidine
tcttggttacatgaaatcccatc

SEQ ID NO: 587 - RNA, 23 nt, synthetic construct
  source 1..23: mol_type = other RNA
  modified_base 1: mod_base = OTHER; note = 2'-O-methyladenosine-3'-phosphate
  modified_base 2: mod_base = OTHER; note = 2'-deoxy-2'-fluorouridine-3'-phosphate
  modified_base 3: mod_base = OTHER; note = 2'-O-methylguanosine-3'-phosphate
  modified_base 4: mod_base = OTHER; note = 2'-deoxy-2'-fluoroguanosine-3'-phosphate
  modified_base 5: mod_base = OTHER; note = 2'-O-methyladenosine-3'-phosphate
  modified_base 6: mod_base = OTHER; note = 2'-deoxy-2'-fluoroadenosine-3'-phosphate
  modified_base 7: mod_base = OTHER; note = 2'-O-methyluridine-3'-phosphate
  modified_base 8: mod_base = OTHER; note = 2'-O-methyladenosine-3'-phosphate
  modified_base 9: mod_base = OTHER; note = 2'-O-methylcytidine-3'-phosphate
  modified_base 10: mod_base = OTHER; note = 2'-deoxy-2'-fluorouridine-3'-phosphate
  modified_base 11: mod_base = OTHER; note = 2'-O-methylcytidine-3'-phosphate
  modified_base 12: mod_base = OTHER; note = 2'-deoxy-2'-fluorouridine-3'-phosphate
  modified_base 13: mod_base = OTHER; note = 2'-deoxy-2'-fluorouridine-3'-phosphate
  modified_base 14: mod_base = OTHER; note = 2'-deoxy-2'-fluoroguanosine-3'-phosphate
  modified_base 15: mod_base = OTHER; note = 2'-O-methylguanosine-3'-phosphate
  modified_base 16: mod_base = OTHER; note = 2'-deoxy-2'-fluorouridine-3'-phosphate
  modified_base 17: mod_base = OTHER; note = 2'-O-methyluridine-3'-phosphate
  modified_base 18: mod_base = OTHER; note = 2'-deoxy-2'-fluoroadenosine-3'-phosphate
  modified_base 19: mod_base = OTHER; note = 2'-O-methylcytidine-3'-phosphate
  modified_base 20: mod_base = OTHER; note = 2'-deoxy-2'-fluoroadenosine-3'-phosphate
  modified_base 21: mod_base = OTHER; note = 2'-O-methyluridine-3'-phosphorothioate
  modified_base 22: mod_base = OTHER; note = 2'-deoxy-2'-fluoroguanosine-3'-phosphorothioate
  modified_base 23: mod_base = OTHER; note = 2'-O-methyladenosine
atggaatactcttggttacatga

SEQ ID NO: 588 - RNA, 23 nt, synthetic construct
  source 1..23: mol_type = other RNA
  modified_base 1: mod_base = OTHER; note = 2'-O-methyladenosine-3'-phosphate
  modified_base 2: mod_base = OTHER; note = 2'-deoxy-2'-fluorouridine-3'-phosphate
  modified_base 3: mod_base = OTHER; note = 2'-O-methylguanosine-3'-phosphate
  modified_base 4: mod_base = OTHER; note = 2'-deoxy-2'-fluoroguanosine-3'-phosphate
  modified_base 5: mod_base = OTHER; note = 2'-O-methyladenosine-3'-phosphate
  modified_base 6: mod_base = OTHER; note = 2'-O-methyladenosine-3'-phosphate
  modified_base 7: mod_base = OTHER; note = 2'-O-methyluridine-3'-phosphate
  modified_base 8: mod_base = OTHER; note = 2'-deoxy-2'-fluoroadenosine-3'-phosphate
  modified_base 9: mod_base = OTHER; note = 2'-O-methylcytidine-3'-phosphate
  modified_base 10: mod_base = OTHER; note = 2'-deoxy-2'-fluorouridine-3'-phosphate
  modified_base 11: mod_base = OTHER; note = 2'-O-methylcytidine-3'-phosphate
  modified_base 12: mod_base = OTHER; note = 2'-deoxy-2'-fluorouridine-3'-phosphate
  modified_base 13: mod_base = OTHER; note = 2'-O-methyluridine-3'-phosphate
  modified_base 14: mod_base = OTHER; note = 2'-deoxy-2'-fluoroguanosine-3'-phosphate
  modified_base 15: mod_base = OTHER; note = 2'-deoxy-2'-fluoroguanosine-3'-phosphate
  modified_base 16: mod_base = OTHER; note = 2'-deoxy-2'-fluorouridine-3'-phosphate
  modified_base 17: mod_base = OTHER; note = 2'-O-methyluridine-3'-phosphate
  modified_base 18: mod_base = OTHER; note = 2'-deoxy-2'-fluoroadenosine-3'-phosphate
  modified_base 19: mod_base = OTHER; note = 2'-O-methylcytidine-3'-phosphate
  modified_base 20: mod_base = OTHER; note = 2'-deoxy-2'-fluoroadenosine-3'-phosphate
  modified_base 21: mod_base = OTHER; note = 2'-O-methyluridine-3'-phosphorothioate
  modified_base 22: mod_base = OTHER; note = 2'-deoxy-2'-fluoroguanosine-3'-phosphorothioate
  modified_base 23: mod_base = OTHER; note = 2'-O-methyladenosine
atggaatactcttggttacatga

SEQ ID NO: 589 - RNA, 23 nt, synthetic construct
  source 1..23: mol_type = other RNA
  modified_base 1: mod_base = OTHER; note = 2'-O-methyladenosine-3'-phosphate
  modified_base 2: mod_base = OTHER; note = 2'-deoxy-2'-fluorouridine-3'-phosphate
  modified_base 3: mod_base = OTHER; note = 2'-O-methylguanosine-3'-phosphate
  modified_base 4: mod_base = OTHER; note = 2'-deoxy-2'-fluoroguanosine-3'-phosphate
  modified_base 5: mod_base = OTHER; note = 2'-O-methyladenosine-3'-phosphate
  modified_base 6: mod_base = OTHER; note = 2'-deoxy-2'-fluoroadenosine-3'-phosphate
  modified_base 7: mod_base = OTHER; note = 2'-O-methyluridine-3'-phosphate
  modified_base 8: mod_base = OTHER; note = 2'-O-methyladenosine-3'-phosphate
  modified_base 9: mod_base = OTHER; note = 2'-O-methylcytidine-3'-phosphate
  modified_base 10: mod_base = OTHER; note = 2'-deoxy-2'-fluorouridine-3'-phosphate
  modified_base 11: mod_base = OTHER; note = 2'-deoxy-2'-fluorocytidine-3'-phosphate
  modified_base 12: mod_base = OTHER; note = 2'-deoxy-2'-fluorouridine-3'-phosphate
  modified_base 13: mod_base = OTHER; note = 2'-O-methyluridine-3'-phosphate
  modified_base 14: mod_base = OTHER; note = 2'-deoxy-2'-fluoroguanosine-3'-phosphate
  modified_base 15: mod_base = OTHER; note = 2'-O-methylguanosine-3'-phosphate
  modified_base 16: mod_base = OTHER; note = 2'-deoxy-2'-fluorouridine-3'-phosphate
  modified_base 17: mod_base = OTHER; note = 2'-O-methyluridine-3'-phosphate
  modified_base 18: mod_base = OTHER; note = 2'-deoxy-2'-fluoroadenosine-3'-phosphate
  modified_base 19: mod_base = OTHER; note = 2'-O-methylcytidine-3'-phosphate
  modified_base 20: mod_base = OTHER; note = 2'-deoxy-2'-fluoroadenosine-3'-phosphate
  modified_base 21: mod_base = OTHER; note = 2'-O-methyluridine-3'-phosphorothioate
  modified_base 22: mod_base = OTHER; note = 2'-deoxy-2'-fluoroguanosine-3'-phosphorothioate
  modified_base 23: mod_base = OTHER; note = 2'-O-methyladenosine
atggaatactcttggttacatga

SEQ ID NO: 590 - RNA, 23 nt, synthetic construct
  source 1..23: mol_type = other RNA
  modified_base 1: mod_base = OTHER; note = 2'-O-methyladenosine-3'-phosphate
  modified_base 2: mod_base = OTHER; note = 2'-deoxy-2'-fluorouridine-3'-phosphate
  modified_base 3: mod_base = OTHER; note = 2'-O-methylguanosine-3'-phosphate
  modified_base 4: mod_base = OTHER; note = 2'-deoxy-2'-fluoroguanosine-3'-phosphate
  modified_base 5: mod_base = OTHER; note = 2'-O-methyladenosine-3'-phosphate
  modified_base 6: mod_base = OTHER; note = 2'-O-methyladenosine-3'-phosphate
  modified_base 7: mod_base = OTHER; note = 2'-O-methyluridine-3'-phosphate
  modified_base 8: mod_base = OTHER; note = 2'-deoxy-2'-fluoroadenosine-3'-phosphate
  modified_base 9: mod_base = OTHER; note = 2'-O-methylcytidine-3'-phosphate
  modified_base 10: mod_base = OTHER; note = 2'-deoxy-2'-fluorouridine-3'-phosphate
  modified_base 11: mod_base = OTHER; note = 2'-O-methylcytidine-3'-phosphate
  modified_base 12: mod_base = OTHER; note = 2'-deoxy-2'-fluorouridine-3'-phosphate
  modified_base 13: mod_base = OTHER; note = 2'-deoxy-2'-fluorouridine-3'-phosphate
  modified_base 14: mod_base = OTHER; note = 2'-deoxy-2'-fluoroguanosine-3'-phosphate
  modified_base 15: mod_base = OTHER; note = 2'-O-methylguanosine-3'-phosphate
  modified_base 16: mod_base = OTHER; note = 2'-deoxy-2'-fluorouridine-3'-phosphate
  modified_base 17: mod_base = OTHER; note = 2'-O-methyluridine-3'-phosphate
  modified_base 18: mod_base = OTHER; note = 2'-deoxy-2'-fluoroadenosine-3'-phosphate
  modified_base 19: mod_base = OTHER; note = 2'-O-methylcytidine-3'-phosphate
  modified_base 20: mod_base = OTHER; note = 2'-deoxy-2'-fluoroadenosine-3'-phosphate
  modified_base 21: mod_base = OTHER; note = 2'-O-methyluridine-3'-phosphorothioate
  modified_base 22: mod_base = OTHER; note = 2'-deoxy-2'-fluoroguanosine-3'-phosphorothioate
  modified_base 23: mod_base = OTHER; note = 2'-O-methyladenosine
atggaatactcttggttacatga

SEQ ID NO: 591 - RNA, 23 nt, synthetic construct
  source 1..23: mol_type = other RNA
  modified_base 1: mod_base = OTHER; note = 2'-O-methyladenosine-3'-phosphate
  modified_base 2: mod_base = OTHER; note = 2'-deoxy-2'-fluorouridine-3'-phosphate
  modified_base 3: mod_base = OTHER; note = 2'-O-methylguanosine-3'-phosphate
  modified_base 4: mod_base = OTHER; note = 2'-deoxy-2'-fluoroguanosine-3'-phosphate
  modified_base 5: mod_base = OTHER; note = 2'-O-methyladenosine-3'-phosphate
  modified_base 6: mod_base = OTHER; note = 2'-deoxy-2'-fluoroadenosine-3'-phosphate
  modified_base 7: mod_base = OTHER; note = 2'-O-methyluridine-3'-phosphate
  modified_base 8: mod_base = OTHER; note = 2'-deoxy-2'-fluoroadenosine-3'-phosphate
  modified_base 9: mod_base = OTHER; note = 2'-O-methylcytidine-3'-phosphate
  modified_base 10: mod_base = OTHER; note = 2'-deoxy-2'-fluorouridine-3'-phosphate
  modified_base 11: mod_base = OTHER; note = 2'-O-methylcytidine-3'-phosphate
  modified_base 12: mod_base = OTHER; note = 2'-deoxy-2'-fluorouridine-3'-phosphate
  modified_base 13: mod_base = OTHER; note = 2'-O-methyluridine-3'-phosphate
  modified_base 14: mod_base = OTHER; note = 2'-O-methylguanosine-3'-phosphate
  modified_base 15: mod_base = OTHER; note = 2'-O-methylguanosine-3'-phosphate
  modified_base 16: mod_base = OTHER; note = 2'-deoxy-2'-fluorouridine-3'-phosphate
  modified_base 17: mod_base = OTHER; note = 2'-O-methyluridine-3'-phosphate
  modified_base 18: mod_base = OTHER; note = 2'-deoxy-2'-fluoroadenosine-3'-phosphate
  modified_base 19: mod_base = OTHER; note = 2'-deoxy-2'-fluorocytidine-3'-phosphate
  modified_base 20: mod_base = OTHER; note = 2'-deoxy-2'-fluoroadenosine-3'-phosphate
  modified_base 21: mod_base = OTHER; note = 2'-O-methyluridine-3'-phosphorothioate
  modified_base 22: mod_base = OTHER; note = 2'-deoxy-2'-fluoroguanosine-3'-phosphorothioate
  modified_base 23: mod_base = OTHER; note = 2'-O-methyladenosine
atggaatactcttggttacatga

SEQ ID NO: 592 - RNA, 23 nt, synthetic construct
  source 1..23: mol_type = other RNA
  modified_base 1: mod_base = OTHER; note = 2'-O-methyladenosine-3'-phosphate
  modified_base 2: mod_base = OTHER; note = 2'-deoxy-2'-fluorouridine-3'-phosphate
  modified_base 3: mod_base = OTHER; note = 2'-O-methylguanosine-3'-phosphate
  modified_base 4: mod_base = OTHER; note = 2'-deoxy-2'-fluoroguanosine-3'-phosphate
  modified_base 5: mod_base = OTHER; note = 2'-O-methyladenosine-3'-phosphate
  modified_base 6: mod_base = OTHER; note = 2'-O-methyladenosine-3'-phosphate
  modified_base 7: mod_base = OTHER; note = 2'-O-methyluridine-3'-phosphate
  modified_base 8: mod_base = OTHER; note = 2'-deoxy-2'-fluoroadenosine-3'-phosphate
  modified_base 9: mod_base = OTHER; note = 2'-O-methylcytidine-3'-phosphate
  modified_base 10: mod_base = OTHER; note = 2'-deoxy-2'-fluorouridine-3'-phosphate
  modified_base 11: mod_base = OTHER; note = 2'-deoxy-2'-fluorocytidine-3'-phosphate
  modified_base 12: mod_base = OTHER; note = 2'-deoxy-2'-fluorouridine-3'-phosphate
  modified_base 13: mod_base = OTHER; note = 2'-O-methyluridine-3'-phosphate
  modified_base 14: mod_base = OTHER; note = 2'-deoxy-2'-fluoroguanosine-3'-phosphate
  modified_base 15: mod_base = OTHER; note = 2'-O-methylguanosine-3'-phosphate
  modified_base 16: mod_base = OTHER; note = 2'-deoxy-2'-fluorouridine-3'-phosphate
  modified_base 17: mod_base = OTHER; note = 2'-O-methyluridine-3'-phosphate
  modified_base 18: mod_base = OTHER; note = 2'-deoxy-2'-fluoroadenosine-3'-phosphate
  modified_base 19: mod_base = OTHER; note = 2'-O-methylcytidine-3'-phosphate
  modified_base 20: mod_base = OTHER; note = 2'-deoxy-2'-fluoroadenosine-3'-phosphate
  modified_base 21: mod_base = OTHER; note = 2'-O-methyluridine-3'-phosphorothioate
  modified_base 22: mod_base = OTHER; note = 2'-deoxy-2'-fluoroguanosine-3'-phosphorothioate
  modified_base 23: mod_base = OTHER; note = 2'-O-methyladenosine
atggaatactcttggttacatga

SEQ ID NO: 593 - RNA, 23 nt, synthetic construct
  source 1..23: mol_type = other RNA
  modified_base 1: mod_base = OTHER; note = 2'-O-methyladenosine-3'-phosphate
  modified_base 2: mod_base = OTHER; note = 2'-deoxy-2'-fluorouridine-3'-phosphate
  modified_base 3: mod_base = OTHER; note = 2'-O-methylguanosine-3'-phosphate
  modified_base 4: mod_base = OTHER; note = 2'-deoxy-2'-fluoroguanosine-3'-phosphate
  modified_base 5: mod_base = OTHER; note = 2'-O-methyladenosine-3'-phosphate
  modified_base 6: mod_base = OTHER; note = 2'-deoxy-2'-fluoroadenosine-3'-phosphate
  modified_base 7: mod_base = OTHER; note = 2'-O-methyluridine-3'-phosphate
  modified_base 8: mod_base = OTHER; note = 2'-deoxy-2'-fluoroadenosine-3'-phosphate
  modified_base 9: mod_base = OTHER; note = 2'-O-methylcytidine-3'-phosphate
  modified_base 10: mod_base = OTHER; note = 2'-deoxy-2'-fluorouridine-3'-phosphate
  modified_base 11: mod_base = OTHER; note = 2'-deoxy-2'-fluorocytidine-3'-phosphate
  modified_base 12: mod_base = OTHER; note = 2'-deoxy-2'-fluorouridine-3'-phosphate
  modified_base 13: mod_base = OTHER; note = 2'-O-methyluridine-3'-phosphate
  modified_base 14: mod_base = OTHER; note = 2'-O-methylguanosine-3'-phosphate
  modified_base 15: mod_base = OTHER; note = 2'-O-methylguanosine-3'-phosphate
  modified_base 16: mod_base = OTHER; note = 2'-deoxy-2'-fluorouridine-3'-phosphate
  modified_base 17: mod_base = OTHER; note = 2'-O-methyluridine-3'-phosphate
  modified_base 18: mod_base = OTHER; note = 2'-deoxy-2'-fluoroadenosine-3'-phosphate
  modified_base 19: mod_base = OTHER; note = 2'-O-methylcytidine-3'-phosphate
  modified_base 20: mod_base = OTHER; note = 2'-deoxy-2'-fluoroadenosine-3'-phosphate
  modified_base 21: mod_base = OTHER; note = 2'-O-methyluridine-3'-phosphorothioate
  modified_base 22: mod_base = OTHER; note = 2'-deoxy-2'-fluoroguanosine-3'-phosphorothioate
  modified_base 23: mod_base = OTHER; note = 2'-O-methyladenosine
atggaatactcttggttacatga

SEQ ID NO: 594 - RNA, 23 nt, synthetic construct
  source 1..23: mol_type = other RNA
  modified_base 1: mod_base = OTHER; note = 2'-O-methyladenosine-3'-phosphate
  modified_base 2: mod_base = OTHER; note = 2'-deoxy-2'-fluorouridine-3'-phosphate
  modified_base 3: mod_base = OTHER; note = 2'-O-methylguanosine-3'-phosphate
  modified_base 4: mod_base = OTHER; note = 2'-deoxy-2'-fluoroguanosine-3'-phosphate
  modified_base 5: mod_base = OTHER; note = 2'-O-methyladenosine-3'-phosphate
  modified_base 6: mod_base = OTHER; note = 2'-O-methyladenosine-3'-phosphate
  modified_base 7: mod_base = OTHER; note = 2'-O-methyluridine-3'-phosphate
  modified_base 8: mod_base = OTHER; note = 2'-deoxy-2'-fluoroadenosine-3'-phosphate
  modified_base 9: mod_base = OTHER; note = 2'-O-methylcytidine-3'-phosphate
  modified_base 10: mod_base = OTHER; note = 2'-deoxy-2'-fluorouridine-3'-phosphate
  modified_base 11: mod_base = OTHER; note = 2'-O-methylcytidine-3'-phosphate
  modified_base 12: mod_base = OTHER; note = 2'-deoxy-2'-fluorouridine-3'-phosphate
  modified_base 13: mod_base = OTHER; note = 2'-O-methyluridine-3'-phosphate
  modified_base 14: mod_base = OTHER; note = 2'-deoxy-2'-fluoroguanosine-3'-phosphate
  modified_base 15: mod_base = OTHER; note = 2'-O-methylguanosine-3'-phosphate
  modified_base 16: mod_base = OTHER; note = 2'-deoxy-2'-fluorouridine-3'-phosphate
  modified_base 17: mod_base = OTHER; note = 2'-O-methyluridine-3'-phosphate
  modified_base 18: mod_base = OTHER; note = 2'-deoxy-2'-fluoroadenosine-3'-phosphate
  modified_base 19: mod_base = OTHER; note = 2'-O-methylcytidine-3'-phosphate
  modified_base 20: mod_base = OTHER; note = 2'-deoxy-2'-fluoroadenosine-3'-phosphate
  modified_base 21: mod_base = OTHER; note = 2'-deoxy-2'-fluorouridine-3'-phosphorothioate
  modified_base 22: mod_base = OTHER; note = 2'-deoxy-2'-fluoroguanosine-3'-phosphorothioate
  modified_base 23: mod_base = OTHER; note = 2'-O-methyladenosine
atggaatactcttggttacatga

SEQ ID NO: 595 - RNA, 23 nt, synthetic construct
  source 1..23: mol_type = other RNA
  modified_base 1: mod_base = OTHER; note = 2'-O-methyladenosine-3'-phosphate
  modified_base 2: mod_base = OTHER; note = 2'-deoxy-2'-fluorouridine-3'-phosphate
  modified_base 3: mod_base = OTHER; note = 2'-O-methylguanosine-3'-phosphate
  modified_base 4: mod_base = OTHER; note = 2'-deoxy-2'-fluoroguanosine-3'-phosphate
  modified_base 5: mod_base = OTHER; note = 2'-O-methyladenosine-3'-phosphate
  modified_base 6: mod_base = OTHER; note = 2'-O-methyladenosine-3'-phosphate
  modified_base 7: mod_base = OTHER; note = 2'-O-methyluridine-3'-phosphate
  modified_base 8: mod_base = OTHER; note = 2'-deoxy-2'-fluoroadenosine-3'-phosphate
  modified_base 9: mod_base = OTHER; note = 2'-O-methylcytidine-3'-phosphate
  modified_base 10: mod_base = OTHER; note = 2'-deoxy-2'-fluorouridine-3'-phosphate
  modified_base 11: mod_base = OTHER; note = 2'-O-methylcytidine-3'-phosphate
  modified_base 12: mod_base = OTHER; note = 2'-deoxy-2'-fluorouridine-3'-phosphate
  modified_base 13: mod_base = OTHER; note = 2'-O-methyluridine-3'-phosphate
  modified_base 14: mod_base = OTHER; note = 2'-deoxy-2'-fluoroguanosine-3'-phosphate
  modified_base 15: mod_base = OTHER; note = 2'-O-methylguanosine-3'-phosphate
  modified_base 16: mod_base = OTHER; note = 2'-deoxy-2'-fluorouridine-3'-phosphate
  modified_base 17: mod_base = OTHER; note = 2'-O-methyluridine-3'-phosphate
  modified_base 18: mod_base = OTHER; note = 2'-deoxy-2'-fluoroadenosine-3'-phosphate
  modified_base 19: mod_base = OTHER; note = 2'-deoxy-2'-fluorocytidine-3'-phosphate
  modified_base 20: mod_base = OTHER; note = 2'-deoxy-2'-fluoroadenosine-3'-phosphate
  modified_base 21: mod_base = OTHER; note = 2'-O-methyluridine-3'-phosphorothioate
  modified_base 22: mod_base = OTHER; note = 2'-deoxy-2'-fluoroguanosine-3'-phosphorothioate
  modified_base 23: mod_base = OTHER; note = 2'-O-methyladenosine
atggaatactcttggttacatga

SEQ ID NO: 596 - RNA, 23 nt, synthetic construct
  source 1..23: mol_type = other RNA
  modified_base 1: mod_base = OTHER; note = 2'-O-methyladenosine-3'-phosphate
  modified_base 2: mod_base = OTHER; note = 2'-deoxy-2'-fluorouridine-3'-phosphate
  modified_base 3: mod_base = OTHER; note = 2'-O-methylguanosine-3'-phosphate
  modified_base 4: mod_base = OTHER; note = 2'-O-methylguanosine-3'-phosphate
  modified_base 5: mod_base = OTHER; note = 2'-O-methyladenosine-3'-phosphate
  modified_base 6: mod_base = OTHER; note = 2'-deoxy-2'-fluoroadenosine-3'-phosphate
  modified_base 7: mod_base = OTHER; note = 2'-O-methyluridine-3'-phosphate
  modified_base 8: mod_base = OTHER; note = 2'-deoxy-2'-fluoroadenosine-3'-phosphate
  modified_base 9: mod_base = OTHER; note = 2'-O-methylcytidine-3'-phosphate
  modified_base 10: mod_base = OTHER; note = 2'-deoxy-2'-fluorouridine-3'-phosphate
  modified_base 11: mod_base = OTHER; note = 2'-O-methylcytidine-3'-phosphate
  modified_base 12: mod_base = OTHER; note = 2'-deoxy-2'-fluorouridine-3'-phosphate
  modified_base 13: mod_base = OTHER; note = 2'-O-methyluridine-3'-phosphate
  modified_base 14: mod_base = OTHER; note = 2'-deoxy-2'-fluoroguanosine-3'-phosphate
  modified_base 15: mod_base = OTHER; note = 2'-O-methylguanosine-3'-phosphate
  modified_base 16: mod_base = OTHER; note = 2'-deoxy-2'-fluorouridine-3'-phosphate
  modified_base 17: mod_base = OTHER; note = 2'-O-methyluridine-3'-phosphate
  modified_base 18: mod_base = OTHER; note = 2'-deoxy-2'-fluoroadenosine-3'-phosphate
  modified_base 19: mod_base = OTHER; note = 2'-O-methylcytidine-3'-phosphate
  modified_base 20: mod_base = OTHER; note = 2'-deoxy-2'-fluoroadenosine-3'-phosphate
  modified_base 21: mod_base = OTHER; note = 2'-deoxy-2'-fluorouridine-3'-phosphorothioate
  modified_base 22: mod_base = OTHER; note = 2'-deoxy-2'-fluoroguanosine-3'-phosphorothioate
  modified_base 23: mod_base = OTHER; note = 2'-O-methyladenosine
atggaatactcttggttacatga

SEQ ID NO: 597 - RNA, 23 nt, synthetic construct
  source 1..23: mol_type = other RNA
  modified_base 1: mod_base = OTHER; note = 2'-O-methyladenosine-3'-phosphate
  modified_base 2: mod_base = OTHER; note = 2'-deoxy-2'-fluorouridine-3'-phosphate
  modified_base 3: mod_base = OTHER; note = 2'-O-methylguanosine-3'-phosphate
  modified_base 4: mod_base = OTHER; note = 2'-deoxy-2'-fluoroguanosine-3'-phosphate
  modified_base 5: mod_base = OTHER; note = 2'-deoxy-2'-fluoroadenosine-3'-phosphate
  modified_base 6: mod_base = OTHER; note = 2'-deoxy-2'-fluoroadenosine-3'-phosphate
  modified_base 7: mod_base = OTHER; note = 2'-O-methyluridine-3'-phosphate
  modified_base 8: mod_base = OTHER; note = 2'-deoxy-2'-fluoroadenosine-3'-phosphate
  modified_base 9: mod_base = OTHER; note = 2'-O-methylcytidine-3'-phosphate
  modified_base 10: mod_base = OTHER; note = 2'-deoxy-2'-fluorouridine-3'-phosphate
  modified_base 11: mod_base = OTHER; note = 2'-O-methylcytidine-3'-phosphate
  modified_base 12: mod_base = OTHER; note = 2'-deoxy-2'-fluorouridine-3'-phosphate
  modified_base 13: mod_base = OTHER; note = 2'-O-methyluridine-3'-phosphate
  modified_base 14: mod_base = OTHER; note = 2'-O-methylguanosine-3'-phosphate
  modified_base 15: mod_base = OTHER; note = 2'-O-methylguanosine-3'-phosphate
  modified_base 16: mod_base = OTHER; note = 2'-deoxy-2'-fluorouridine-3'-phosphate
  modified_base 17: mod_base = OTHER; note = 2'-O-methyluridine-3'-phosphate
  modified_base 18: mod_base = OTHER; note = 2'-deoxy-2'-fluoroadenosine-3'-phosphate
  modified_base 19: mod_base = OTHER; note = 2'-O-methylcytidine-3'-phosphate
  modified_base 20: mod_base = OTHER; note = 2'-deoxy-2'-fluoroadenosine-3'-phosphate
  modified_base 21: mod_base = OTHER; note = 2'-O-methyluridine-3'-phosphorothioate
  modified_base 22: mod_base = OTHER; note = 2'-deoxy-2'-fluoroguanosine-3'-phosphorothioate
  modified_base 23: mod_base = OTHER; note = 2'-O-methyladenosine
atggaatactcttggttacatga

SEQ ID NO: 598 - RNA, 23 nt, synthetic construct
  source 1..23: mol_type = other RNA
  modified_base 1: mod_base = OTHER; note = 2'-O-methyladenosine-3'-phosphate
  modified_base 2: mod_base = OTHER; note = 2'-deoxy-2'-fluorouridine-3'-phosphate
  modified_base 3: mod_base = OTHER; note = 2'-O-methylguanosine-3'-phosphate
  modified_base 4: mod_base = OTHER; note = 2'-deoxy-2'-fluoroguanosine-3'-phosphate
  modified_base 5: mod_base = OTHER; note = 2'-O-methyladenosine-3'-phosphate
  modified_base 6: mod_base = OTHER; note = 2'-deoxy-2'-fluoroadenosine-3'-phosphate
  modified_base 7: mod_base = OTHER; note = 2'-O-methyluridine-3'-phosphate
  modified_base 8: mod_base = OTHER; note = 2'-deoxy-2'-fluoroadenosine-3'-phosphate
  modified_base 9: mod_base = OTHER; note = 2'-O-methylcytidine-3'-phosphate
  modified_base 10: mod_base = OTHER; note = 2'-O-methyluridine-3'-phosphate
  modified_base 11: mod_base = OTHER; note = 2'-O-methylcytidine-3'-phosphate
  modified_base 12: mod_base = OTHER; note = 2'-deoxy-2'-fluorouridine-3'-phosphate
  modified_base 13: mod_base = OTHER; note = 2'-deoxy-2'-fluorouridine-3'-phosphate
  modified_base 14: mod_base = OTHER; note = 2'-deoxy-2'-fluoroguanosine-3'-phosphate
  modified_base 15: mod_base = OTHER; note = 2'-O-methylguanosine-3'-phosphate
  modified_base 16: mod_base = OTHER; note = 2'-deoxy-2'-fluorouridine-3'-phosphate
  modified_base 17: mod_base = OTHER; note = 2'-O-methyluridine-3'-phosphate
  modified_base 18: mod_base = OTHER; note = 2'-deoxy-2'-fluoroadenosine-3'-phosphate
  modified_base 19: mod_base = OTHER; note = 2'-O-methylcytidine-3'-phosphate
  modified_base 20: mod_base = OTHER; note = 2'-deoxy-2'-fluoroadenosine-3'-phosphate
  modified_base 21: mod_base = OTHER; note = 2'-O-methyluridine-3'-phosphorothioate
  modified_base 22: mod_base = OTHER; note = 2'-deoxy-2'-fluoroguanosine-3'-phosphorothioate
  modified_base 23: mod_base = OTHER; note = 2'-O-methyladenosine
atggaatactcttggttacatga

SEQ ID NO: 599 - RNA, 23 nt, synthetic construct
  source 1..23: mol_type = other RNA
  modified_base 1: mod_base = OTHER; note = 2'-O-methyladenosine-3'-phosphate
  modified_base 2: mod_base = OTHER; note = 2'-deoxy-2'-fluorouridine-3'-phosphate
  modified_base 3: mod_base = OTHER; note = 2'-O-methylguanosine-3'-phosphate
  modified_base 4: mod_base = OTHER; note = 2'-deoxy-2'-fluoroguanosine-3'-phosphate
  modified_base 5: mod_base = OTHER; note = 2'-O-methyladenosine-3'-phosphate
  modified_base 6: mod_base = OTHER; note = 2'-O-methyladenosine-3'-phosphate
  modified_base 7: mod_base = OTHER; note = 2'-O-methyluridine-3'-phosphate
  modified_base 8: mod_base = OTHER; note = 2'-deoxy-2'-fluoroadenosine-3'-phosphate
  modified_base 9: mod_base = OTHER; note = 2'-O-methylcytidine-3'-phosphate
  modified_base 10: mod_base = OTHER; note = 2'-deoxy-2'-fluorouridine-3'-phosphate
  modified_base 11: mod_base = OTHER; note = 2'-O-methylcytidine-3'-phosphate
  modified_base 12: mod_base = OTHER; note = 2'-deoxy-2'-fluorouridine-3'-phosphate
  modified_base 13: mod_base = OTHER; note = 2'-O-methyluridine-3'-phosphate
  modified_base 14: mod_base = OTHER; note = 2'-deoxy-2'-fluoroguanosine-3'-phosphate
  modified_base 15: mod_base = OTHER; note = 2'-O-methylguanosine-3'-phosphate
  modified_base 16: mod_base = OTHER; note = 2'-deoxy-2'-fluorouridine-3'-phosphate
  modified_base 17: mod_base = OTHER; note = 2'-deoxy-2'-fluorouridine-3'-phosphate
  modified_base 18: mod_base = OTHER; note = 2'-deoxy-2'-fluoroadenosine-3'-phosphate
  modified_base 19: mod_base = OTHER; note = 2'-O-methylcytidine-3'-phosphate
  modified_base 20: mod_base = OTHER; note = 2'-deoxy-2'-fluoroadenosine-3'-phosphate
  modified_base 21: mod_base = OTHER; note = 2'-O-methyluridine-3'-phosphorothioate
  modified_base 22: mod_base = OTHER; note = 2'-deoxy-2'-fluoroguanosine-3'-phosphorothioate
  modified_base 23: mod_base = OTHER; note = 2'-O-methyladenosine
atggaatactcttggttacatga

SEQ ID NO: 600 - RNA, 23 nt, synthetic construct
  source 1..23: mol_type = other RNA
  modified_base 1: mod_base = OTHER; note = 2'-O-methyladenosine-3'-phosphate
  modified_base 2: mod_base = OTHER; note = 2'-deoxy-2'-fluorouridine-3'-phosphate
  modified_base 3: mod_base = OTHER; note = 2'-O-methylguanosine-3'-phosphate
  modified_base 4: mod_base = OTHER; note = 2'-O-methylguanosine-3'-phosphate
  modified_base 5: mod_base = OTHER; note = 2'-O-methyladenosine-3'-phosphate
  modified_base 6: mod_base = OTHER; note = 2'-deoxy-2'-fluoroadenosine-3'-phosphate
  modified_base 7: mod_base = OTHER; note = 2'-O-methyluridine-3'-phosphate
  modified_base 8: mod_base = OTHER; note = 2'-deoxy-2'-fluoroadenosine-3'-phosphate
  modified_base 9: mod_base = OTHER; note = 2'-O-methylcytidine-3'-phosphate
  modified_base 10: mod_base = OTHER; note = 2'-deoxy-2'-fluorouridine-3'-phosphate
  modified_base 11: mod_base = OTHER; note = 2'-O-methylcytidine-3'-phosphate
  modified_base 12: mod_base = OTHER; note = 2'-deoxy-2'-fluorouridine-3'-phosphate
  modified_base 13: mod_base = OTHER; note = 2'-O-methyluridine-3'-phosphate
  modified_base 14: mod_base = OTHER; note = 2'-deoxy-2'-fluoroguanosine-3'-phosphate
  modified_base 15: mod_base = OTHER; note = 2'-O-methylguanosine-3'-phosphate
  modified_base 16: mod_base = OTHER; note = 2'-deoxy-2'-fluorouridine-3'-phosphate
  modified_base 17: mod_base = OTHER; note = 2'-O-methyluridine-3'-phosphate
  modified_base 18: mod_base = OTHER; note = 2'-deoxy-2'-fluoroadenosine-3'-phosphate
  modified_base 19: mod_base = OTHER; note = 2'-deoxy-2'-fluorocytidine-3'-phosphate
  modified_base 20: mod_base = OTHER; note = 2'-deoxy-2'-fluoroadenosine-3'-phosphate
  modified_base 21: mod_base = OTHER; note = 2'-O-methyluridine-3'-phosphorothioate
  modified_base 22: mod_base = OTHER; note = 2'-deoxy-2'-fluoroguanosine-3'-phosphorothioate
  modified_base 23: mod_base = OTHER; note = 2'-O-methyladenosine
atggaatactcttggttacatga

SEQ ID NO: 601 - RNA, 23 nt, synthetic construct
  source 1..23: mol_type = other RNA
  modified_base 1: mod_base = OTHER; note = 2'-O-methyladenosine-3'-phosphate
  modified_base 2: mod_base = OTHER; note = 2'-O-methyluridine-3'-phosphate
  modified_base 3: mod_base = OTHER; note = 2'-O-methylguanosine-3'-phosphate
  modified_base 4: mod_base = OTHER; note = 2'-deoxy-2'-fluoroguanosine-3'-phosphate
  modified_base 5: mod_base = OTHER; note = 2'-O-methyladenosine-3'-phosphate
  modified_base 6: mod_base = OTHER; note = 2'-deoxy-2'-fluoroadenosine-3'-phosphate
  modified_base 7: mod_base = OTHER; note = 2'-O-methyluridine-3'-phosphate
  modified_base 8: mod_base = OTHER; note = 2'-deoxy-2'-fluoroadenosine-3'-phosphate
  modified_base 9: mod_base = OTHER; note = 2'-O-methylcytidine-3'-phosphate
  modified_base 10: mod_base = OTHER; note = 2'-deoxy-2'-fluorouridine-3'-phosphate
  modified_base 11: mod_base = OTHER; note = 2'-O-methylcytidine-3'-phosphate
  modified_base 12: mod_base = OTHER; note = 2'-deoxy-2'-fluorouridine-3'-phosphate
  modified_base 13: mod_base = OTHER; note = 2'-O-methyluridine-3'-phosphate
  modified_base 14: mod_base = OTHER; note = 2'-deoxy-2'-fluoroguanosine-3'-phosphate
  modified_base 15: mod_base = OTHER; note = 2'-O-methylguanosine-3'-phosphate
  modified_base 16: mod_base = OTHER; note = 2'-deoxy-2'-fluorouridine-3'-phosphate
  modified_base 17: mod_base = OTHER; note = 2'-O-methyluridine-3'-phosphate
  modified_base 18: mod_base = OTHER; note = 2'-deoxy-2'-fluoroadenosine-3'-phosphate
  modified_base 19: mod_base = OTHER; note = 2'-O-methylcytidine-3'-phosphate
  modified_base 20: mod_base = OTHER; note = 2'-deoxy-2'-fluoroadenosine-3'-phosphate
  modified_base 21: mod_base = OTHER; note = 2'-O-methyluridine-3'-phosphorothioate
  modified_base 22: mod_base = OTHER; note = 2'-deoxy-2'-fluoroguanosine-3'-phosphorothioate
  modified_base 23: mod_base = OTHER; note = 2'-O-methyladenosine
atggaatactcttggttacatga

SEQ ID NO: 602 - RNA, 23 nt, synthetic construct
  source 1..23: mol_type = other RNA
  modified_base 1: mod_base = OTHER; note = 2'-O-methyladenosine-3'-phosphate
  modified_base 2: mod_base = OTHER; note = 2'-O-methyluridine-3'-phosphate
  modified_base 3: mod_base = OTHER; note = 2'-O-methylguanosine-3'-phosphate
  modified_base 4: mod_base = OTHER; note = 2'-deoxy-2'-fluoroguanosine-3'-phosphate
  modified_base 5: mod_base = OTHER; note = 2'-deoxy-2'-fluoroadenosine-3'-phosphate
  modified_base 6: mod_base = OTHER; note = 2'-deoxy-2'-fluoroadenosine-3'-phosphate
  modified_base 7: mod_base = OTHER; note = 2'-O-methyluridine-3'-phosphate
  modified_base 8: mod_base = OTHER; note = 2'-deoxy-2'-fluoroadenosine-3'-phosphate
  modified_base 9: mod_base = OTHER; note = 2'-O-methylcytidine-3'-phosphate
  modified_base 10: mod_base = OTHER; note = 2'-deoxy-2'-fluorouridine-3'-phosphate
  modified_base 11: mod_base = OTHER; note = 2'-O-methylcytidine-3'-phosphate
  modified_base 12: mod_base = OTHER; note = 2'-deoxy-2'-fluorouridine-3'-phosphate
  modified_base 13: mod_base = OTHER; note = 2'-O-methyluridine-3'-phosphate
  modified_base 14: mod_base = OTHER; note = 2'-deoxy-2'-fluoroguanosine-3'-phosphate
  modified_base 15: mod_base = OTHER; note = 2'-O-methylguanosine-3'-phosphate
  modified_base 16: mod_base = OTHER; note = 2'-deoxy-2'-fluorouridine-3'-phosphate
  modified_base 17: mod_base = OTHER; note = 2'-O-methyluridine-3'-phosphate
  modified_base 18: mod_base = OTHER; note = 2'-deoxy-2'-fluoroadenosine-3'-phosphate
  modified_base 19: mod_base = OTHER; note = 2'-O-methylcytidine-3'-phosphate
  modified_base 20: mod_base = OTHER; note = 2'-deoxy-2'-fluoroadenosine-3'-phosphate
  modified_base 21: mod_base = OTHER; note = 2'-O-methyluridine-3'-phosphorothioate
  modified_base 22: mod_base = OTHER; note = 2'-deoxy-2'-fluoroguanosine-3'-phosphorothioate
  modified_base 23: mod_base = OTHER; note = 2'-O-methyladenosine
atggaatactcttggttacatga

SEQ ID NO: 603 - RNA, 23 nt, synthetic construct
  source 1..23: mol_type = other RNA
  modified_base 1: mod_base = OTHER; note = 2'-O-methyladenosine-3'-phosphate
  modified_base 2: mod_base = OTHER; note = 2'-deoxy-2'-fluorouridine-3'-phosphate
  modified_base 3: mod_base = OTHER; note = 2'-O-methylguanosine-3'-phosphate
  modified_base 4: mod_base = OTHER; note = 2'-deoxy-2'-fluoroguanosine-3'-phosphate
  modified_base 5: mod_base = OTHER; note = 2'-O-methyladenosine-3'-phosphate
  modified_base 6: mod_base = OTHER; note = 2'-deoxy-2'-fluoroadenosine-3'-phosphate
  modified_base 7: mod_base = OTHER; note = 2'-O-methyluridine-3'-phosphate
  modified_base 8: mod_base = OTHER; note = 2'-deoxy-2'-fluoroadenosine-3'-phosphate
  modified_base 9: mod_base = OTHER; note = 2'-O-methylcytidine-3'-phosphate
  modified_base 10: mod_base = OTHER; note = 2'-deoxy-2'-fluorouridine-3'-phosphate
  modified_base 11: mod_base = OTHER; note = 2'-O-methylcytidine-3'-phosphate
  modified_base 12: mod_base = OTHER; note = 2'-deoxy-2'-fluorouridine-3'-phosphate
  modified_base 13: mod_base = OTHER; note = 2'-O-methyluridine-3'-phosphate
  modified_base 14: mod_base = OTHER; note = 2'-deoxy-2'-fluoroguanosine-3'-phosphate
  modified_base 15: mod_base = OTHER; note = 2'-O-methylguanosine-3'-phosphate
  modified_base 16: mod_base = OTHER; note = 2'-deoxy-2'-fluorouridine-3'-phosphate
  modified_base 17: mod_base = OTHER; note = 2'-O-methyluridine-3'-phosphate
  modified_base 18: mod_base = OTHER; note = 2'-deoxy-2'-fluoroadenosine-3'-phosphate
  modified_base 19: mod_base = OTHER; note = 2'-O-methylcytidine-3'-phosphate
  modified_base 20: mod_base = OTHER; note = 2'-deoxy-2'-fluoroadenosine-3'-phosphate
  modified_base 21: mod_base = OTHER; note = 2'-O-methyluridine-3'-phosphorothioate
  modified_base 22: mod_base = OTHER; note = 2'-deoxy-2'-fluoroguanosine-3'-phosphorothioate
  modified_base 23: mod_base = OTHER; note = 2'-O-methyladenosine
atggaatactcttggttacatga

SEQ ID NO: 604 - RNA, 23 nt, synthetic construct
  source 1..23: mol_type = other RNA
  modified_base 1: mod_base = OTHER; note = 2'-O-methyladenosine-3'-phosphate
  modified_base 2: mod_base = OTHER; note = 2'-deoxy-2'-fluorouridine-3'-phosphate
  modified_base 3: mod_base = OTHER; note = 2'-O-methylguanosine-3'-phosphate
  modified_base 4: mod_base = OTHER; note = 2'-O-methylguanosine-3'-phosphate
  modified_base 5: mod_base = OTHER; note = 2'-O-methyladenosine-3'-phosphate
  modified_base 6: mod_base = OTHER; note = 2'-deoxy-2'-fluoroadenosine-3'-phosphate
  modified_base 7: mod_base = OTHER; note = 2'-O-methyluridine-3'-phosphate
  modified_base 8: mod_base = OTHER; note = 2'-deoxy-2'-fluoroadenosine-3'-phosphate
  modified_base 9: mod_base = OTHER; note = 2'-O-methylcytidine-3'-phosphate
  modified_base 10: mod_base = OTHER; note = 2'-deoxy-2'-fluorouridine-3'-phosphate
  modified_base 11: mod_base = OTHER; note = 2'-O-methylcytidine-3'-phosphate
  modified_base 12: mod_base = OTHER; note = 2'-deoxy-2'-fluorouridine-3'-phosphate
  modified_base 13: mod_base = OTHER; note = 2'-O-methyluridine-3'-phosphate
  modified_base 14: mod_base = OTHER; note = 2'-deoxy-2'-fluoroguanosine-3'-phosphate
  modified_base 15: mod_base = OTHER; note = 2'-O-methylguanosine-3'-phosphate
  modified_base 16: mod_base = OTHER; note = 2'-deoxy-2'-fluorouridine-3'-phosphate
  modified_base 17: mod_base = OTHER; note = 2'-deoxy-2'-fluorouridine-3'-phosphate
  modified_base 18: mod_base = OTHER; note = 2'-deoxy-2'-fluoroadenosine-3'-phosphate
  modified_base 19: mod_base = OTHER; note = 2'-O-methylcytidine-3'-phosphate
  modified_base 20: mod_base = OTHER; note = 2'-deoxy-2'-fluoroadenosine-3'-phosphate
  modified_base 21: mod_base = OTHER; note = 2'-O-methyluridine-3'-phosphorothioate
  modified_base 22: mod_base = OTHER; note = 2'-deoxy-2'-fluoroguanosine-3'-phosphorothioate
  modified_base 23: mod_base = OTHER; note = 2'-O-methyladenosine
atggaatactcttggttacatga

SEQ ID NO: 605 - RNA, 23 nt, synthetic construct
  source 1..23: mol_type = other RNA
  modified_base 1: mod_base = OTHER; note = 2'-O-methyladenosine-3'-phosphate
  modified_base 2: mod_base = OTHER; note = 2'-O-methyluridine-3'-phosphate
  modified_base 3: mod_base = OTHER; note = 2'-O-methylguanosine-3'-phosphate
  modified_base 4: mod_base = OTHER; note = 2'-deoxy-2'-fluoroguanosine-3'-phosphate
  modified_base 5: mod_base = OTHER; note = 2'-O-methyladenosine-3'-phosphate
  modified_base 6: mod_base = OTHER; note = 2'-deoxy-2'-fluoroadenosine-3'-phosphate
  modified_base 7: mod_base = OTHER; note = 2'-O-methyluridine-3'-phosphate
  modified_base 8: mod_base = OTHER; note = 2'-deoxy-2'-fluoroadenosine-3'-phosphate
  modified_base 9: mod_base = OTHER; note = 2'-O-methylcytidine-3'-phosphate
  modified_base 10: mod_base = OTHER; note = 2'-deoxy-2'-fluorouridine-3'-phosphate
  modified_base 11: mod_base = OTHER; note = 2'-O-methylcytidine-3'-phosphate
  modified_base 12: mod_base = OTHER; note = 2'-deoxy-2'-fluorouridine-3'-phosphate
  modified_base 13: mod_base = OTHER; note = 2'-O-methyluridine-3'-phosphate
  modified_base 14: mod_base = OTHER; note = 2'-deoxy-2'-fluoroguanosine-3'-phosphate
  modified_base 15: mod_base = OTHER; note = 2'-O-methylguanosine-3'-phosphate
  modified_base 16: mod_base = OTHER; note = 2'-deoxy-2'-fluorouridine-3'-phosphate
  modified_base 17: mod_base = OTHER; note = 2'-O-methyluridine-3'-phosphate
  modified_base 18: mod_base = OTHER; note = 2'-deoxy-2'-fluoroadenosine-3'-phosphate
  modified_base 19: mod_base = OTHER; note = 2'-O-methylcytidine-3'-phosphate
  modified_base 20: mod_base = OTHER; note = 2'-deoxy-2'-fluoroadenosine-3'-phosphate
  modified_base 21: mod_base = OTHER; note = 2'-deoxy-2'-fluorouridine-3'-phosphorothioate
  modified_base 22: mod_base = OTHER; note = 2'-deoxy-2'-fluoroguanosine-3'-phosphorothioate
  modified_base 23: mod_base = OTHER; note = 2'-O-methyladenosine
atggaatactcttggttacatga

SEQ ID NO: 606 - RNA, 23 nt, synthetic construct
  source 1..23: mol_type = other RNA
  modified_base 1: mod_base = OTHER; note = 2'-O-methyladenosine-3'-phosphate
  modified_base 2: mod_base = OTHER; note = 2'-deoxy-2'-fluorouridine-3'-phosphate
  modified_base 3: mod_base = OTHER; note = 2'-O-methylguanosine-3'-phosphate
  modified_base 4: mod_base = OTHER; note = 2'-deoxy-2'-fluoroguanosine-3'-phosphate
  modified_base 5: mod_base = OTHER; note = 2'-O-methyladenosine-3'-phosphate
  modified_base 6: mod_base = OTHER; note = 2'-deoxy-2'-fluoroadenosine-3'-phosphate
  modified_base 7: mod_base = OTHER; note = 2'-O-methyluridine-3'-phosphate
  modified_base 8: mod_base = OTHER; note = 2'-deoxy-2'-fluoroadenosine-3'-phosphate
  modified_base 9: mod_base = OTHER; note = 2'-O-methylcytidine-3'-phosphate
  modified_base 10: mod_base = OTHER; note = 2'-deoxy-2'-fluorouridine-3'-phosphate
  modified_base 11: mod_base = OTHER; note = 2'-O-methylcytidine-3'-phosphate
  modified_base 12: mod_base = OTHER; note = 2'-deoxy-2'-fluorouridine-3'-phosphate
  modified_base 13: mod_base = OTHER; note = 2'-O-methyluridine-3'-phosphate
  modified_base 14: mod_base = OTHER; note = 2'-deoxy-2'-fluoroguanosine-3'-phosphate
  modified_base 15: mod_base = OTHER; note = 2'-O-methylguanosine-3'-phosphate
  modified_base 16: mod_base = OTHER; note = 2'-deoxy-2'-fluorouridine-3'-phosphate
  modified_base 17: mod_base = OTHER; note = 2'-O-methyluridine-3'-phosphate
  modified_base 18: mod_base = OTHER; note = 2'-deoxy-2'-fluoroadenosine-3'-phosphate
  modified_base 19: mod_base = OTHER; note = 2'-O-methylcytidine-3'-phosphate
  modified_base 20: mod_base = OTHER; note = 2'-deoxy-2'-fluoroadenosine-3'-phosphate
  modified_base 21: mod_base = OTHER; note = 2'-O-methyluridine-3'-phosphorothioate
  modified_base 22: mod_base = OTHER; note = 2'-deoxy-2'-fluoroguanosine-3'-phosphorothioate
  modified_base 23: mod_base = OTHER; note = 2'-O-methyladenosine
atggaatactcttggttacatga

SEQ ID NO: 607 - RNA, 23 nt, synthetic construct
  source 1..23: mol_type = other RNA
  modified_base 1: mod_base = OTHER; note = 2'-O-methyladenosine-3'-phosphate
  modified_base 2: mod_base = OTHER; note = 2'-deoxy-2'-fluorouridine-3'-phosphate
  modified_base 3: mod_base = OTHER; note = 2'-O-methylguanosine-3'-phosphate
  modified_base 4: mod_base = OTHER; note = 2'-deoxy-2'-fluoroguanosine-3'-phosphate
  modified_base 5: mod_base = OTHER; note = 2'-O-methyladenosine-3'-phosphate
  modified_base 6: mod_base = OTHER; note = 2'-deoxy-2'-fluoroadenosine-3'-phosphate
  modified_base 7: mod_base = OTHER; note = 2'-O-methyluridine-3'-phosphate
  modified_base 8: mod_base = OTHER; note = 2'-deoxy-2'-fluoroadenosine-3'-phosphate
  modified_base 9: mod_base = OTHER; note = 2'-O-methylcytidine-3'-phosphate
  modified_base 10: mod_base = OTHER; note = 2'-deoxy-2'-fluorouridine-3'-phosphate
  modified_base 11: mod_base = OTHER; note = 2'-O-methylcytidine-3'-phosphate
  modified_base 12: mod_base = OTHER; note = 2'-deoxy-2'-fluorouridine-3'-phosphate
  modified_base 13: mod_base = OTHER; note = 2'-O-methyluridine-3'-phosphate
  modified_base 14: mod_base = OTHER; note = 2'-deoxy-2'-fluoroguanosine-3'-phosphate
  modified_base 15: mod_base = OTHER; note = 2'-O-methylguanosine-3'-phosphate
  modified_base 16: mod_base = OTHER; note = 2'-deoxy-2'-fluorouridine-3'-phosphate
  modified_base 17: mod_base = OTHER; note = 2'-O-methyluridine-3'-phosphate
  modified_base 18: mod_base = OTHER; note = 2'-deoxy-2'-fluoroadenosine-3'-phosphate
  modified_base 19: mod_base = OTHER; note = 2'-O-methylcytidine-3'-phosphate
  modified_base 20: mod_base = OTHER; note = 2'-deoxy-2'-fluoroadenosine-3'-phosphate
  modified_base 21: mod_base = OTHER; note = 2'-O-methyluridine-3'-phosphorothioate
  modified_base 22: mod_base = OTHER; note = 2'-deoxy-2'-fluoroguanosine-3'-phosphorothioate
  modified_base 23: mod_base = OTHER; note = 2'-O-methyladenosine
atggaatactcttggttacatga

SEQ ID NO: 608 - RNA, 23 nt, synthetic construct
  source 1..23: mol_type = other RNA
  modified_base 1: mod_base = OTHER; note = 2'-O-methyladenosine-3'-phosphate
  modified_base 2: mod_base = OTHER; note = 2'-deoxy-2'-fluorouridine-3'-phosphate
  modified_base 3: mod_base = OTHER; note = 2'-O-methylguanosine-3'-phosphate
  modified_base 4: mod_base = OTHER; note = 2'-O-methylguanosine-3'-phosphate
  modified_base 5: mod_base = OTHER; note = 2'-O-methyladenosine-3'-phosphate
  modified_base 6: mod_base = OTHER; note = 2'-deoxy-2'-fluoroadenosine-3'-phosphate
  modified_base 7: mod_base = OTHER; note = 2'-O-methyluridine-3'-phosphate
  modified_base 8: mod_base = OTHER; note = 2'-deoxy-2'-fluoroadenosine-3'-phosphate
  modified_base 9: mod_base = OTHER; note = 2'-O-methylcytidine-3'-phosphate
  modified_base 10: mod_base = OTHER; note = 2'-deoxy-2'-fluorouridine-3'-phosphate
  modified_base 11: mod_base = OTHER; note = 2'-O-methylcytidine-3'-phosphate
  modified_base 12: mod_base = OTHER; note = 2'-deoxy-2'-fluorouridine-3'-phosphate
  modified_base 13: mod_base = OTHER; note = 2'-O-methyluridine-3'-phosphate
  modified_base 14: mod_base = OTHER; note = 2'-deoxy-2'-fluoroguanosine-3'-phosphate
  modified_base 15: mod_base = OTHER; note = 2'-deoxy-2'-fluoroguanosine-3'-phosphate
  modified_base 16: mod_base = OTHER; note = 2'-deoxy-2'-fluorouridine-3'-phosphate
  modified_base 17: mod_base = OTHER; note = 2'-O-methyluridine-3'-phosphate
  modified_base 18: mod_base = OTHER; note = 2'-deoxy-2'-fluoroadenosine-3'-phosphate
  modified_base 19: mod_base = OTHER; note = 2'-O-methylcytidine-3'-phosphate
  modified_base 20: mod_base = OTHER; note = 2'-deoxy-2'-fluoroadenosine-3'-phosphate
  modified_base 21: mod_base = OTHER; note = 2'-O-methyluridine-3'-phosphorothioate
  modified_base 22: mod_base = OTHER; note = 2'-deoxy-2'-fluoroguanosine-3'-phosphorothioate
  modified_base 23: mod_base = OTHER; note = 2'-O-methyladenosine
atggaatactcttggttacatga

SEQ ID NO: 609 - RNA, 23 nt, synthetic construct
  source 1..23: mol_type = other RNA
  modified_base 1: mod_base = OTHER; note = 2'-O-methyladenosine-3'-phosphate
  modified_base 2: mod_base = OTHER; note = 2'-O-methyluridine-3'-phosphate
  modified_base 3: mod_base = OTHER; note = 2'-O-methylguanosine-3'-phosphate
  modified_base 4: mod_base = OTHER; note = 2'-deoxy-2'-fluoroguanosine-3'-phosphate
  modified_base 5: mod_base = OTHER; note = 2'-O-methyladenosine-3'-phosphate
  modified_base 6: mod_base = OTHER; note = 2'-deoxy-2'-fluoroadenosine-3'-phosphate
  modified_base 7: mod_base = OTHER; note = 2'-O-methyluridine-3'-phosphate
  modified_base 8: mod_base = OTHER; note = 2'-deoxy-2'-fluoroadenosine-3'-phosphate
  modified_base 9: mod_base = OTHER; note = 2'-O-methylcytidine-3'-phosphate
  modified_base 10: mod_base = OTHER; note = 2'-deoxy-2'-fluorouridine-3'-phosphate
  modified_base 11: mod_base = OTHER; note = 2'-O-methylcytidine-3'-phosphate
  modified_base 12: mod_base = OTHER; note = 2'-deoxy-2'-fluorouridine-3'-phosphate
  modified_base 13: mod_base = OTHER; note = 2'-O-methyluridine-3'-phosphate
  modified_base 14: mod_base = OTHER; note = 2'-deoxy-2'-fluoroguanosine-3'-phosphate
  modified_base 15: mod_base = OTHER; note = 2'-O-methylguanosine-3'-phosphate
  modified_base 16: mod_base = OTHER; note = 2'-deoxy-2'-fluorouridine-3'-phosphate
  modified_base 17: mod_base = OTHER; note = 2'-O-methyluridine-3'-phosphate
  modified_base 18: mod_base = OTHER; note = 2'-deoxy-2'-fluoroadenosine-3'-phosphate
  modified_base 19: mod_base = OTHER; note = 2'-deoxy-2'-fluorocytidine-3'-phosphate
  modified_base 20: mod_base = OTHER; note = 2'-deoxy-2'-fluoroadenosine-3'-phosphate
  modified_base 21: mod_base = OTHER; note = 2'-O-methyluridine-3'-phosphorothioate
  modified_base 22: mod_base = OTHER; note = 2'-deoxy-2'-fluoroguanosine-3'-phosphorothioate
  modified_base 23: mod_base = OTHER; note = 2'-O-methyladenosine
atggaatactcttggttacatga

SEQ ID NO: 610 - RNA, 23 nt, synthetic construct
  source 1..23: mol_type = other RNA
  modified_base 1: mod_base = OTHER; note = 2'-O-methyladenosine-3'-phosphate
  modified_base 2: mod_base = OTHER; note = 2'-deoxy-2'-fluorouridine-3'-phosphate
  modified_base 3: mod_base = OTHER; note = 2'-O-methylguanosine-3'-phosphate
  modified_base 4: mod_base = OTHER; note = 2'-deoxy-2'-fluoroguanosine-3'-phosphate
  modified_base 5: mod_base = OTHER; note = 2'-O-methyladenosine-3'-phosphate
  modified_base 6: mod_base = OTHER; note = 2'-deoxy-2'-fluoroadenosine-3'-phosphate
  modified_base 7: mod_base = OTHER; note = 2'-O-methyluridine-3'-phosphate
  modified_base 8: mod_base = OTHER; note = 2'-deoxy-2'-fluoroadenosine-3'-phosphate
  modified_base 9: mod_base = OTHER; note = 2'-O-methylcytidine-3'-phosphate
  modified_base 10: mod_base = OTHER; note = 2'-deoxy-2'-fluorouridine-3'-phosphate
  modified_base 11: mod_base = OTHER; note = 2'-O-methylcytidine-3'-phosphate
  modified_base 12: mod_base = OTHER; note = 2'-deoxy-2'-fluorouridine-3'-phosphate
  modified_base 13: mod_base = OTHER; note = 2'-O-methyluridine-3'-phosphate
  modified_base 14: mod_base = OTHER; note = 2'-deoxy-2'-fluoroguanosine-3'-phosphate
  modified_base 15: mod_base = OTHER; note = 2'-O-methylguanosine-3'-phosphate
  modified_base 16: mod_base = OTHER; note = 2'-deoxy-2'-fluorouridine-3'-phosphate
  modified_base 17: mod_base = OTHER; note = 2'-O-methyluridine-3'-phosphate
  modified_base 18: mod_base = OTHER; note = 2'-deoxy-2'-fluoroadenosine-3'-phosphate
  modified_base 19: mod_base = OTHER; note = 2'-O-methylcytidine-3'-phosphate
  modified_base 20: mod_base = OTHER; note = 2'-deoxy-2'-fluoroadenosine-3'-phosphate
  modified_base 21: mod_base = OTHER; note = 2'-O-methyluridine-3'-phosphorothioate
  modified_base 22: mod_base = OTHER; note = 2'-deoxy-2'-fluoroguanosine-3'-phosphorothioate
  modified_base 23: mod_base = OTHER; note = 2'-O-methyladenosine
atggaatactcttggttacatga

SEQ ID NO: 611 - RNA, 23 nt, synthetic construct
  source 1..23: mol_type = other RNA
  modified_base 1: mod_base = OTHER; note = 2'-O-methyladenosine-3'-phosphate
  modified_base 2: mod_base = OTHER; note = 2'-deoxy-2'-fluorouridine-3'-phosphate
  modified_base 3: mod_base = OTHER; note = 2'-O-methylguanosine-3'-phosphate
  modified_base 4: mod_base = OTHER; note = 2'-deoxy-2'-fluoroguanosine-3'-phosphate
  modified_base 5: mod_base = OTHER; note = 2'-O-methyladenosine-3'-phosphate
  modified_base 6: mod_base = OTHER; note = 2'-deoxy-2'-fluoroadenosine-3'-phosphate
  modified_base 7: mod_base = OTHER; note = 2'-O-methyluridine-3'-phosphate
  modified_base 8: mod_base = OTHER; note = 2'-deoxy-2'-fluoroadenosine-3'-phosphate
  modified_base 9: mod_base = OTHER; note = 2'-O-methylcytidine-3'-phosphate
  modified_base 10: mod_base = OTHER; note = 2'-deoxy-2'-fluorouridine-3'-phosphate
  modified_base 11: mod_base = OTHER; note = 2'-O-methylcytidine-3'-phosphate
  modified_base 12: mod_base = OTHER; note = 2'-deoxy-2'-fluorouridine-3'-phosphate
  modified_base 13: mod_base = OTHER; note = 2'-O-methyluridine-3'-phosphate
  modified_base 14: mod_base = OTHER; note = 2'-deoxy-2'-fluoroguanosine-3'-phosphate
  modified_base 15: mod_base = OTHER; note = 2'-O-methylguanosine-3'-phosphate
  modified_base 16: mod_base = OTHER; note = 2'-deoxy-2'-fluorouridine-3'-phosphate
  modified_base 17: mod_base = OTHER; note = 2'-O-methyluridine-3'-phosphate
  modified_base 18: mod_base = OTHER; note = 2'-deoxy-2'-fluoroadenosine-3'-phosphate
  modified_base 19: mod_base = OTHER; note = 2'-O-methylcytidine-3'-phosphate
  modified_base 20: mod_base = OTHER; note = 2'-deoxy-2'-fluoroadenosine-3'-phosphate
  modified_base 21: mod_base = OTHER; note = 2'-O-methyluridine-3'-phosphorothioate
  modified_base 22: mod_base = OTHER; note = 2'-deoxy-2'-fluoroguanosine-3'-phosphorothioate
  modified_base 23: mod_base = OTHER; note = 2'-O-methyladenosine
atggaatactcttggttacatga

SEQ ID NO: 612 - RNA, 23 nt, synthetic construct
  source 1..23: mol_type = other RNA
  modified_base 1: mod_base = OTHER; note = 2'-O-methyladenosine-3'-phosphate
  modified_base 2: mod_base = OTHER; note = 2'-deoxy-2'-fluorouridine-3'-phosphate
  modified_base 3: mod_base = OTHER; note = 2'-O-methylguanosine-3'-phosphate
  modified_base 4: mod_base = OTHER; note = 2'-O-methylguanosine-3'-phosphate
  modified_base 5: mod_base = OTHER; note = 2'-O-methyladenosine-3'-phosphate
  modified_base 6: mod_base = OTHER; note = 2'-deoxy-2'-fluoroadenosine-3'-phosphate
  modified_base 7: mod_base = OTHER; note = 2'-O-methyluridine-3'-phosphate
  modified_base 8: mod_base = OTHER; note = 2'-deoxy-2'-fluoroadenosine-3'-phosphate
  modified_base 9: mod_base = OTHER; note = 2'-O-methylcytidine-3'-phosphate
  modified_base 10: mod_base = OTHER; note = 2'-deoxy-2'-fluorouridine-3'-phosphate
  modified_base 11: mod_base = OTHER; note = 2'-O-methylcytidine-3'-phosphate
  modified_base 12: mod_base = OTHER; note = 2'-deoxy-2'-fluorouridine-3'-phosphate
  modified_base 13: mod_base = OTHER; note = 2'-deoxy-2'-fluorouridine-3'-phosphate
  modified_base 14: mod_base = OTHER; note = 2'-deoxy-2'-fluoroguanosine-3'-phosphate
  modified_base 15: mod_base = OTHER; note = 2'-O-methylguanosine-3'-phosphate
  modified_base 16: mod_base = OTHER; note = 2'-deoxy-2'-fluorouridine-3'-phosphate
  modified_base 17: mod_base = OTHER; note = 2'-O-methyluridine-3'-phosphate
  modified_base 18: mod_base = OTHER; note = 2'-deoxy-2'-fluoroadenosine-3'-phosphate
  modified_base 19: mod_base = OTHER; note = 2'-O-methylcytidine-3'-phosphate
  modified_base 20: mod_base = OTHER; note = 2'-deoxy-2'-fluoroadenosine-3'-phosphate
  modified_base 21: mod_base = OTHER; note = 2'-O-methyluridine-3'-phosphorothioate
  modified_base 22: mod_base = OTHER; note = 2'-deoxy-2'-fluoroguanosine-3'-phosphorothioate
  modified_base 23: mod_base = OTHER; note = 2'-O-methyladenosine
atggaatactcttggttacatga

SEQ ID NO: 613 - RNA, 23 nt, synthetic construct
  source 1..23: mol_type = other RNA
  modified_base 1: mod_base = OTHER; note = 2'-O-methyladenosine-3'-phosphate
  modified_base 2: mod_base = OTHER; note = 2'-O-methyluridine-3'-phosphate
  modified_base 3: mod_base = OTHER; note = 2'-O-methylguanosine-3'-phosphate
  modified_base 4: mod_base = OTHER; note = 2'-deoxy-2'-fluoroguanosine-3'-phosphate
  modified_base 5: mod_base = OTHER; note = 2'-O-methyladenosine-3'-phosphate
  modified_base 6: mod_base = OTHER; note = 2'-deoxy-2'-fluoroadenosine-3'-phosphate
  modified_base 7: mod_base = OTHER; note = 2'-O-methyluridine-3'-phosphate
  modified_base 8: mod_base = OTHER; note = 2'-deoxy-2'-fluoroadenosine-3'-phosphate
  modified_base 9: mod_base = OTHER; note = 2'-O-methylcytidine-3'-phosphate
  modified_base 10: mod_base = OTHER; note = 2'-deoxy-2'-fluorouridine-3'-phosphate
  modified_base 11: mod_base = OTHER; note = 2'-O-methylcytidine-3'-phosphate
  modified_base 12: mod_base = OTHER; note = 2'-deoxy-2'-fluorouridine-3'-phosphate
  modified_base 13: mod_base = OTHER; note = 2'-O-methyluridine-3'-phosphate
  modified_base 14: mod_base = OTHER; note = 2'-deoxy-2'-fluoroguanosine-3'-phosphate
  modified_base 15: mod_base = OTHER; note = 2'-O-methylguanosine-3'-phosphate
  modified_base 16: mod_base = OTHER; note = 2'-deoxy-2'-fluorouridine-3'-phosphate
  modified_base 17: mod_base = OTHER; note = 2'-deoxy-2'-fluorouridine-3'-phosphate
  modified_base 18: mod_base = OTHER; note = 2'-deoxy-2'-fluoroadenosine-3'-phosphate
  modified_base 19: mod_base = OTHER; note = 2'-O-methylcytidine-3'-phosphate
  modified_base 20: mod_base = OTHER; note = 2'-deoxy-2'-fluoroadenosine-3'-phosphate
  modified_base 21: mod_base = OTHER; note = 2'-O-methyluridine-3'-phosphorothioate
  modified_base 22: mod_base = OTHER; note = 2'-deoxy-2'-fluoroguanosine-3'-phosphorothioate
  modified_base 23: mod_base = OTHER; note = 2'-O-methyladenosine
atggaatactcttggttacatga

SEQ ID NO: 614 - RNA, 23 nt, synthetic construct
  source 1..23: mol_type = other RNA
  modified_base 1: mod_base = OTHER; note = 2'-O-methyladenosine-3'-phosphate
  modified_base 2: mod_base = OTHER; note = 2'-deoxy-2'-fluorouridine-3'-phosphate
  modified_base 3: mod_base = OTHER; note = 2'-O-methylguanosine-3'-phosphate
  modified_base 4: mod_base = OTHER; note = 2'-deoxy-2'-fluoroguanosine-3'-phosphate
  modified_base 5: mod_base = OTHER; note = 2'-O-methyladenosine-3'-phosphate
  modified_base 6: mod_base = OTHER; note = 2'-deoxy-2'-fluoroadenosine-3'-phosphate
  modified_base 7: mod_base = OTHER; note = 2'-O-methyluridine-3'-phosphate
  modified_base 8: mod_base = OTHER; note = 2'-deoxy-2'-fluoroadenosine-3'-phosphate
  modified_base 9: mod_base = OTHER; note = 2'-O-methylcytidine-3'-phosphate
  modified_base 10: mod_base = OTHER; note = 2'-deoxy-2'-fluorouridine-3'-phosphate
  modified_base 11: mod_base = OTHER; note = 2'-O-methylcytidine-3'-phosphate
  modified_base 12: mod_base = OTHER; note = 2'-deoxy-2'-fluorouridine-3'-phosphate
  modified_base 13: mod_base = OTHER; note = 2'-O-methyluridine-3'-phosphate
  modified_base 14: mod_base = OTHER; note = 2'-deoxy-2'-fluoroguanosine-3'-phosphate
  modified_base 15: mod_base = OTHER; note = 2'-O-methylguanosine-3'-phosphate
  modified_base 16: mod_base = OTHER; note = 2'-deoxy-2'-fluorouridine-3'-phosphate
  modified_base 17: mod_base = OTHER; note = 2'-O-methyluridine-3'-phosphate
  modified_base 18: mod_base = OTHER; note = 2'-deoxy-2'-fluoroadenosine-3'-phosphate
  modified_base 19: mod_base = OTHER; note = 2'-O-methylcytidine-3'-phosphate
  modified_base 20: mod_base = OTHER; note = 2'-deoxy-2'-fluoroadenosine-3'-phosphate
  modified_base 21: mod_base = OTHER; note = 2'-O-methyluridine-3'-phosphorothioate
  modified_base 22: mod_base = OTHER; note = 2'-deoxy-2'-fluoroguanosine-3'-phosphorothioate
  modified_base 23: mod_base = OTHER; note = 2'-O-methyladenosine
atggaatactcttggttacatga

SEQ ID NO: 615 - RNA, 23 nt, synthetic construct
  source 1..23: mol_type = other RNA
  modified_base 1: mod_base = OTHER; note = 2'-O-methyladenosine-3'-phosphate
  modified_base 2: mod_base = OTHER; note = 2'-deoxy-2'-fluorouridine-3'-phosphate
  modified_base 3: mod_base = OTHER; note = 2'-O-methylguanosine-3'-phosphate
  modified_base 4: mod_base = OTHER; note = 2'-deoxy-2'-fluoroguanosine-3'-phosphate
  modified_base 5: mod_base = OTHER; note = 2'-O-methyladenosine-3'-phosphate
  modified_base 6: mod_base = OTHER; note = 2'-deoxy-2'-fluoroadenosine-3'-phosphate
  modified_base 7: mod_base = OTHER; note = 2'-O-methyluridine-3'-phosphate
  modified_base 8: mod_base = OTHER; note = 2'-deoxy-2'-fluoroadenosine-3'-phosphate
  modified_base 9: mod_base = OTHER; note = 2'-O-methylcytidine-3'-phosphate
  modified_base 10: mod_base = OTHER; note = 2'-deoxy-2'-fluorouridine-3'-phosphate
  modified_base 11: mod_base = OTHER; note = 2'-O-methylcytidine-3'-phosphate
  modified_base 12: mod_base = OTHER; note = 2'-deoxy-2'-fluorouridine-3'-phosphate
  modified_base 13: mod_base = OTHER; note = 2'-O-methyluridine-3'-phosphate
  modified_base 14: mod_base = OTHER; note = 2'-deoxy-2'-fluoroguanosine-3'-phosphate
  modified_base 15: mod_base = OTHER; note = 2'-O-methylguanosine-3'-phosphate
  modified_base 16: mod_base = OTHER; note = 2'-deoxy-2'-fluorouridine-3'-phosphate
  modified_base 17: mod_base = OTHER; note = 2'-O-methyluridine-3'-phosphate
  modified_base 18: mod_base = OTHER; note = 2'-deoxy-2'-fluoroadenosine-3'-phosphate
  modified_base 19: mod_base = OTHER; note = 2'-O-methylcytidine-3'-phosphate
  modified_base 20: mod_base = OTHER; note = 2'-deoxy-2'-fluoroadenosine-3'-phosphate
  modified_base 21: mod_base = OTHER; note = 2'-O-methyluridine-3'-phosphorothioate
  modified_base 22: mod_base = OTHER; note = 2'-deoxy-2'-fluoroguanosine-3'-phosphorothioate
  modified_base 23: mod_base = OTHER; note = 2'-O-methyladenosine
atggaatactcttggttacatga

SEQ ID NO: 616 - DNA, 23 bp, synthetic construct
  source 1..23: mol_type = other DNA
  modified_base 1: mod_base = OTHER; note = 2'-O-methyladenosine-3'-phosphate
  modified_base 2: mod_base = OTHER; note = 2'-deoxy-2'-fluorouridine-3'-phosphate
  modified_base 3: mod_base = OTHER; note = 2'-O-methylguanosine-3'-phosphate
  modified_base 4: mod_base = OTHER; note = 2'-deoxy-2'-fluoroguanosine-3'-phosphate
  modified_base 5: mod_base = OTHER; note = 2'-O-methyladenosine-3'-phosphate
  modified_base 6: mod_base = OTHER; note = 2'-deoxy-2'-fluoroadenosine-3'-phosphate
  modified_base 7: mod_base = OTHER; note = 2'-O-methyluridine-3'-phosphate
  modified_base 8: mod_base = OTHER; note = 2'-deoxy-2'-fluoroadenosine-3'-phosphate
  modified_base 9: mod_base = OTHER; note = 2'-O-methylcytidine-3'-phosphate
  modified_base 10: mod_base = OTHER; note = 2'-deoxy-2'-fluorouridine-3'-phosphate
  modified_base 11: mod_base = OTHER; note = 2'-O-methylcytidine-3'-phosphate
  modified_base 12: mod_base = OTHER; note = 2'-deoxy-2'-fluorouridine-3'-phosphate
  modified_base 13: mod_base = OTHER; note = 2'-O-methyluridine-3'-phosphate
  modified_base 14: mod_base = OTHER; note = 2'-O-methylguanosine-3'-phosphate
  modified_base 16: mod_base = OTHER; note = 2'-O-methyluridine-3'-phosphate
  modified_base 18: mod_base = OTHER; note = 2'-O-methyladenosine-3'-phosphate
  modified_base 20: mod_base = OTHER; note = 2'-O-methyladenosine-3'-phosphate
  modified_base 21: mod_base = OTHER; note = 2'-deoxythymidine-3'-phosphorothioate
  modified_base 22: mod_base = OTHER; note = 2'-O-methylguanosine-3'-phosphorothioate
  modified_base 23: mod_base = OTHER; note = 2'-O-methyladenosine
  misc_feature 1..14: note = RNA
  misc_feature 16: note = RNA
  misc_feature 18: note = RNA
  misc_feature 20: note = RNA
  misc_feature 22..23: note = RNA
  misc_feature 15: note = DNA
  misc_feature 17: note = DNA
  misc_feature 19: note = DNA
  misc_feature 21: note = DNA
atggaatactcttggttacatga

SEQ ID NO: 617 - RNA, 23 nt, synthetic construct
  source 1..23: mol_type = other RNA
  modified_base 1: mod_base = OTHER; note = 2'-O-methyladenosine-3'-phosphate
  modified_base 2: mod_base = OTHER; note = 2'-deoxy-2'-fluorouridine-3'-phosphate
  modified_base 3: mod_base = OTHER; note = 2'-O-methylguanosine-3'-phosphate
  modified_base 4: mod_base = OTHER; note = 2'-O-methylguanosine-3'-phosphate
  modified_base 5: mod_base = OTHER; note = 2'-O-methyladenosine-3'-phosphate
  modified_base 6: mod_base = OTHER; note = 2'-deoxy-2'-fluoroadenosine-3'-phosphate
  modified_base 7: mod_base = OTHER; note = 2'-O-methyluridine-3'-phosphate
  modified_base 8: mod_base = OTHER; note = 2'-deoxy-2'-fluoroadenosine-3'-phosphate
  modified_base 9: mod_base = OTHER; note = 2'-O-methylcytidine-3'-phosphate
  modified_base 10: mod_base = OTHER; note = 2'-deoxy-2'-fluorouridine-3'-phosphate
  modified_base 11: mod_base = OTHER; note = 2'-deoxy-2'-fluorocytidine-3'-phosphate
  modified_base 12: mod_base = OTHER; note = 2'-deoxy-2'-fluorouridine-3'-phosphate
  modified_base 13: mod_base = OTHER; note = 2'-O-methyluridine-3'-phosphate
  modified_base 14: mod_base = OTHER; note = 2'-deoxy-2'-fluoroguanosine-3'-phosphate
  modified_base 15: mod_base = OTHER; note = 2'-O-methylguanosine-3'-phosphate
  modified_base 16: mod_base = OTHER; note = 2'-deoxy-2'-fluorouridine-3'-phosphate
  modified_base 17: mod_base = OTHER; note = 2'-O-methyluridine-3'-phosphate
  modified_base 18: mod_base = OTHER; note = 2'-deoxy-2'-fluoroadenosine-3'-phosphate
  modified_base 19: mod_base = OTHER; note = 2'-O-methylcytidine-3'-phosphate
  modified_base 20: mod_base = OTHER; note = 2'-deoxy-2'-fluoroadenosine-3'-phosphate
  modified_base 21: mod_base = OTHER; note = 2'-O-methyluridine-3'-phosphorothioate
  modified_base 22: mod_base = OTHER; note = 2'-deoxy-2'-fluoroguanosine-3'-phosphorothioate
  modified_base 23: mod_base = OTHER; note = 2'-O-methyladenosine
atggaatactcttggttacatga

SEQ ID NO: 618 - RNA, 23 nt, synthetic construct
  source 1..23: mol_type = other RNA
  modified_base 1: mod_base = OTHER; note = 2'-O-methyladenosine-3'-phosphate
  modified_base 2: mod_base = OTHER; note = 2'-O-methyluridine-3'-phosphate
  modified_base 3: mod_base = OTHER; note = 2'-O-methylguanosine-3'-phosphate
  modified_base 4: mod_base = OTHER; note = 2'-deoxy-2'-fluoroguanosine-3'-phosphate
  modified_base 5: mod_base = OTHER; note = 2'-O-methyladenosine-3'-phosphate
  modified_base 6: mod_base = OTHER; note = 2'-deoxy-2'-fluoroadenosine-3'-phosphate
  modified_base 7: mod_base = OTHER; note = 2'-O-methyluridine-3'-phosphate
  modified_base 8: mod_base = OTHER; note = 2'-deoxy-2'-fluoroadenosine-3'-phosphate
  modified_base 9: mod_base = OTHER; note = 2'-O-methylcytidine-3'-phosphate
  modified_base 10: mod_base = OTHER; note = 2'-deoxy-2'-fluorouridine-3'-phosphate
  modified_base 11: mod_base = OTHER; note = 2'-O-methylcytidine-3'-phosphate
  modified_base 12: mod_base = OTHER; note = 2'-deoxy-2'-fluorouridine-3'-phosphate
  modified_base 13: mod_base = OTHER; note = 2'-O-methyluridine-3'-phosphate
  modified_base 14: mod_base = OTHER; note = 2'-deoxy-2'-fluoroguanosine-3'-phosphate
  modified_base 15: mod_base = OTHER; note = 2'-deoxy-2'-fluoroguanosine-3'-phosphate
  modified_base 16: mod_base = OTHER; note = 2'-deoxy-2'-fluorouridine-3'-phosphate
  modified_base 17: mod_base = OTHER; note = 2'-O-methyluridine-3'-phosphate
  modified_base 18: mod_base = OTHER; note = 2'-deoxy-2'-fluoroadenosine-3'-phosphate
  modified_base 19: mod_base = OTHER; note = 2'-O-methylcytidine-3'-phosphate
  modified_base 20: mod_base = OTHER; note = 2'-deoxy-2'-fluoroadenosine-3'-phosphate
  modified_base 21: mod_base = OTHER; note = 2'-O-methyluridine-3'-phosphorothioate
  modified_base 22: mod_base = OTHER; note = 2'-deoxy-2'-fluoroguanosine-3'-phosphorothioate
  modified_base 23: mod_base = OTHER; note = 2'-O-methyladenosine
atggaatactcttggttacatga

SEQ ID NO: 619 - RNA, 23 nt, synthetic construct
  source 1..23: mol_type = other RNA
  modified_base 1: mod_base = OTHER; note = 2'-O-methyladenosine-3'-phosphate
  modified_base 2: mod_base = OTHER; note = 2'-deoxy-2'-fluorouridine-3'-phosphate
  modified_base 3: mod_base = OTHER; note = 2'-O-methylguanosine-3'-phosphate
  modified_base 4: mod_base = OTHER; note = 2'-deoxy-2'-fluoroguanosine-3'-phosphate
  modified_base 5: mod_base = OTHER; note = 2'-O-methyladenosine-3'-phosphate
  modified_base 6: mod_base = OTHER; note = 2'-deoxy-2'-fluoroadenosine-3'-phosphate
  modified_base 7: mod_base = OTHER; note = 2'-O-methyluridine-3'-phosphate
  modified_base 8: mod_base = OTHER; note = 2'-deoxy-2'-fluoroadenosine-3'-phosphate
  modified_base 9: mod_base = OTHER; note = 2'-O-methylcytidine-3'-phosphate
  modified_base 10: mod_base = OTHER; note = 2'-deoxy-2'-fluorouridine-3'-phosphate
  modified_base 11: mod_base = OTHER; note = 2'-O-methylcytidine-3'-phosphate
  modified_base 12: mod_base = OTHER; note = 2'-deoxy-2'-fluorouridine-3'-phosphate
  modified_base 13: mod_base = OTHER; note = 2'-O-methyluridine-3'-phosphate
  modified_base 14: mod_base = OTHER; note = 2'-deoxy-2'-fluoroguanosine-3'-phosphate
  modified_base 15: mod_base = OTHER; note = 2'-O-methylguanosine-3'-phosphate
  modified_base 16: mod_base = OTHER; note = 2'-deoxy-2'-fluorouridine-3'-phosphate
  modified_base 17: mod_base = OTHER; note = 2'-O-methyluridine-3'-phosphate
  modified_base 18: mod_base = OTHER; note = 2'-deoxy-2'-fluoroadenosine-3'-phosphate
  modified_base 19: mod_base = OTHER; note = 2'-O-methylcytidine-3'-phosphate
  modified_base 20: mod_base = OTHER; note = 2'-deoxy-2'-fluoroadenosine-3'-phosphate
  modified_base 21: mod_base = OTHER; note = 2'-O-methyluridine-3'-phosphorothioate
  modified_base 22: mod_base = OTHER; note = 2'-deoxy-2'-fluoroguanosine-3'-phosphorothioate
  modified_base 23: mod_base = OTHER; note = 2'-O-methyladenosine
atggaatactcttggttacatga

SEQ ID NO: 620 - RNA, 23 nt, synthetic construct
  source 1..23: mol_type = other RNA
  modified_base 1: mod_base = OTHER; note = 2'-O-methyladenosine-3'-phosphate
  modified_base 2: mod_base = OTHER; note = 2'-deoxy-2'-fluorouridine-3'-phosphate
  modified_base 3: mod_base = OTHER; note = 2'-O-methylguanosine-3'-phosphate
  modified_base 4: mod_base = OTHER; note = 2'-deoxy-2'-fluoroguanosine-3'-phosphate
  modified_base 5: mod_base = OTHER; note = 2'-O-methyladenosine-3'-phosphate
  modified_base 6: mod_base = OTHER; note = 2'-deoxy-2'-fluoroadenosine-3'-phosphate
  modified_base 7: mod_base = OTHER; note = 2'-O-methyluridine-3'-phosphate
  modified_base 8: mod_base = OTHER; note = 2'-deoxy-2'-fluoroadenosine-3'-phosphate
  modified_base 9: mod_base = OTHER; note = 2'-O-methylcytidine-3'-phosphate
  modified_base 10: mod_base = OTHER; note = 2'-deoxy-2'-fluorouridine-3'-phosphate
  modified_base 11: mod_base = OTHER; note = 2'-O-methylcytidine-3'-phosphate
  modified_base 12: mod_base = OTHER; note = 2'-deoxy-2'-fluorouridine-3'-phosphate
  modified_base 13: mod_base = OTHER; note = 2'-O-methyluridine-3'-phosphate
  modified_base 14: mod_base = OTHER; note = 2'-deoxy-2'-fluoroguanosine-3'-phosphate
  modified_base 15: mod_base = OTHER; note = 2'-deoxy-2'-fluoroguanosine-3'-phosphate
  modified_base 16: mod_base = OTHER; note = 2'-deoxy-2'-fluorouridine-3'-phosphate
  modified_base 17: mod_base = OTHER; note = 2'-O-methyluridine-3'-phosphate
  modified_base 18: mod_base = OTHER; note = 2'-deoxy-2'-fluoroadenosine-3'-phosphate
  modified_base 19: mod_base = OTHER; note = 2'-deoxy-2'-fluorocytidine-3'-phosphate
  modified_base 20: mod_base = OTHER; note = 2'-deoxy-2'-fluoroadenosine-3'-phosphate
  modified_base 21: mod_base = OTHER; note = 2'-O-methyluridine-3'-phosphorothioate
  modified_base 22: mod_base = OTHER; note = 2'-deoxy-2'-fluoroguanosine-3'-phosphorothioate
  modified_base 23: mod_base = OTHER; note = 2'-O-methyladenosine
atggaatactcttggttacatga

SEQ ID NO: 621 - RNA, 23 nt, synthetic construct
  source 1..23: mol_type = other RNA
  modified_base 1: mod_base = OTHER; note = 2'-O-methyladenosine-3'-phosphate
  modified_base 2: mod_base = OTHER; note = 2'-deoxy-2'-fluorouridine-3'-phosphate
  modified_base 3: mod_base = OTHER; note = 2'-O-methylguanosine-3'-phosphate
  modified_base 4: mod_base = OTHER; note = 2'-O-methylguanosine-3'-phosphate
  modified_base 5: mod_base = OTHER; note = 2'-O-methyladenosine-3'-phosphate
  modified_base 6: mod_base = OTHER; note = 2'-deoxy-2'-fluoroadenosine-3'-phosphate
  modified_base 7: mod_base = OTHER; note = 2'-O-methyluridine-3'-phosphate
  modified_base 8: mod_base = OTHER; note = 2'-deoxy-2'-fluoroadenosine-3'-phosphate
  modified_base 9: mod_base = OTHER; note = 2'-deoxy-2'-fluorocytidine-3'-phosphate
  modified_base 10: mod_base = OTHER; note = 2'-deoxy-2'-fluorouridine-3'-phosphate
  modified_base 11: mod_base = OTHER; note = 2'-O-methylcytidine-3'-phosphate
  modified_base 12: mod_base = OTHER; note = 2'-deoxy-2'-fluorouridine-3'-phosphate
  modified_base 13: mod_base = OTHER; note = 2'-O-methyluridine-3'-phosphate
  modified_base 14: mod_base = OTHER; note = 2'-deoxy-2'-fluoroguanosine-3'-phosphate
  modified_base 15: mod_base = OTHER; note = 2'-O-methylguanosine-3'-phosphate
  modified_base 16: mod_base = OTHER; note = 2'-deoxy-2'-fluorouridine-3'-phosphate
  modified_base 17: mod_base = OTHER; note = 2'-O-methyluridine-3'-phosphate
  modified_base 18: mod_base = OTHER; note = 2'-deoxy-2'-fluoroadenosine-3'-phosphate
  modified_base 19: mod_base = OTHER; note = 2'-O-methylcytidine-3'-phosphate
  modified_base 20: mod_base = OTHER; note = 2'-deoxy-2'-fluoroadenosine-3'-phosphate
  modified_base 21: mod_base = OTHER; note = 2'-O-methyluridine-3'-phosphorothioate
  modified_base 22: mod_base = OTHER; note = 2'-deoxy-2'-fluoroguanosine-3'-phosphorothioate
  modified_base 23: mod_base = OTHER; note = 2'-O-methyladenosine
atggaatactcttggttacatga

SEQ ID NO: 622 - RNA, 23 nt, synthetic construct
  source 1..23: mol_type = other RNA
  modified_base 1: mod_base = OTHER; note = 2'-O-methyladenosine-3'-phosphate
  modified_base 2: mod_base = OTHER; note = 2'-O-methyluridine-3'-phosphate
  modified_base 3: mod_base = OTHER; note = 2'-O-methylguanosine-3'-phosphate
  modified_base 4: mod_base = OTHER; note = 2'-deoxy-2'-fluoroguanosine-3'-phosphate
  modified_base 5: mod_base = OTHER; note = 2'-O-methyladenosine-3'-phosphate
  modified_base 6: mod_base = OTHER; note = 2'-deoxy-2'-fluoroadenosine-3'-phosphate
  modified_base 7: mod_base = OTHER; note = 2'-O-methyluridine-3'-phosphate
  modified_base 8: mod_base = OTHER; note = 2'-deoxy-2'-fluoroadenosine-3'-phosphate
  modified_base 9: mod_base = OTHER; note = 2'-O-methylcytidine-3'-phosphate
  modified_base 10: mod_base = OTHER; note = 2'-deoxy-2'-fluorouridine-3'-phosphate
  modified_base 11: mod_base = OTHER; note = 2'-O-methylcytidine-3'-phosphate
  modified_base 12: mod_base = OTHER; note = 2'-deoxy-2'-fluorouridine-3'-phosphate
  modified_base 13: mod_base = OTHER; note = 2'-deoxy-2'-fluorouridine-3'-phosphate
  modified_base 14: mod_base = OTHER; note = 2'-deoxy-2'-fluoroguanosine-3'-phosphate
  modified_base 15: mod_base = OTHER; note = 2'-O-methylguanosine-3'-phosphate
  modified_base 16: mod_base = OTHER; note = 2'-deoxy-2'-fluorouridine-3'-phosphate
  modified_base 17: mod_base = OTHER; note = 2'-O-methyluridine-3'-phosphate
  modified_base 18: mod_base = OTHER; note = 2'-deoxy-2'-fluoroadenosine-3'-phosphate
  modified_base 19: mod_base = OTHER; note = 2'-O-methylcytidine-3'-phosphate
  modified_base 20: mod_base = OTHER; note = 2'-deoxy-2'-fluoroadenosine-3'-phosphate
  modified_base 21: mod_base = OTHER; note = 2'-O-methyluridine-3'-phosphorothioate
  modified_base 22: mod_base = OTHER; note = 2'-deoxy-2'-fluoroguanosine-3'-phosphorothioate
  modified_base 23: mod_base = OTHER; note = 2'-O-methyladenosine
atggaatactcttggttacatga

SEQ ID NO: 623 - RNA, 23 nt, synthetic construct
  source 1..23: mol_type = other RNA
  modified_base 1: mod_base = OTHER; note = 2'-O-methyladenosine-3'-phosphate
  modified_base 2: mod_base = OTHER; note = 2'-deoxy-2'-fluorouridine-3'-phosphate
  modified_base 3: mod_base = OTHER; note = 2'-O-methylguanosine-3'-phosphate
  modified_base 4: mod_base = OTHER; note = 2'-deoxy-2'-fluoroguanosine-3'-phosphate
  modified_base 5: mod_base = OTHER; note = 2'-O-methyladenosine-3'-phosphate
  modified_base 6: mod_base = OTHER; note = 2'-deoxy-2'-fluoroadenosine-3'-phosphate
  modified_base 7: mod_base = OTHER; note = 2'-O-methyluridine-3'-phosphate
  modified_base 8: mod_base = OTHER; note = 2'-deoxy-2'-fluoroadenosine-3'-phosphate
  modified_base 9: mod_base = OTHER; note = 2'-O-methylcytidine-3'-phosphate
  modified_base 10: mod_base = OTHER; note = 2'-deoxy-2'-fluorouridine-3'-phosphate
  modified_base 11: mod_base = OTHER; note = 2'-O-methylcytidine-3'-phosphate
  modified_base 12: mod_base = OTHER; note = 2'-deoxy-2'-fluorouridine-3'-phosphate
  modified_base 13: mod_base = OTHER; note = 2'-O-methyluridine-3'-phosphate
  modified_base 14: mod_base = OTHER; note = 2'-deoxy-2'-fluoroguanosine-3'-phosphate
  modified_base 15: mod_base = OTHER; note = 2'-O-methylguanosine-3'-phosphate
  modified_base 16: mod_base = OTHER; note = 2'-deoxy-2'-fluorouridine-3'-phosphate
  modified_base 17: mod_base = OTHER; note = 2'-O-methyluridine-3'-phosphate
  modified_base 18: mod_base = OTHER; note = 2'-deoxy-2'-fluoroadenosine-3'-phosphate
  modified_base 19: mod_base = OTHER; note = 2'-O-methylcytidine-3'-phosphate
  modified_base 20: mod_base = OTHER; note = 2'-deoxy-2'-fluoroadenosine-3'-phosphate
  modified_base 21: mod_base = OTHER; note = 2'-O-methyluridine-3'-phosphorothioate
  modified_base 22: mod_base = OTHER; note = 2'-deoxy-2'-fluoroguanosine-3'-phosphorothioate
  modified_base 23: mod_base = OTHER; note = 2'-O-methyladenosine
atggaatactcttggttacatga

SEQ ID NO: 624 - RNA, 23 nt, synthetic construct
  source 1..23: mol_type = other RNA
  modified_base 1: mod_base = OTHER; note = 2'-O-methyladenosine-3'-phosphate
  modified_base 2: mod_base = OTHER; note = 2'-deoxy-2'-fluorouridine-3'-phosphate
  modified_base 3: mod_base = OTHER; note = 2'-O-methylguanosine-3'-phosphate
  modified_base 4: mod_base = OTHER; note = 2'-O-methylguanosine-3'-phosphate
  modified_base 5: mod_base = OTHER; note = 2'-O-methyladenosine-3'-phosphate
  modified_base 6: mod_base = OTHER; note = 2'-deoxy-2'-fluoroadenosine-3'-phosphate
  modified_base 7: mod_base = OTHER; note = 2'-deoxy-2'-fluorouridine-3'-phosphate
  modified_base 8: mod_base = OTHER; note = 2'-deoxy-2'-fluoroadenosine-3'-phosphate
  modified_base 9: mod_base = OTHER; note = 2'-O-methylcytidine-3'-phosphate
  modified_base 10: mod_base = OTHER; note = 2'-deoxy-2'-fluorouridine-3'-phosphate
  modified_base 11: mod_base = OTHER; note = 2'-O-methylcytidine-3'-phosphate
  modified_base 12: mod_base = OTHER; note = 2'-deoxy-2'-fluorouridine-3'-phosphate
  modified_base 13: mod_base = OTHER; note = 2'-O-methyluridine-3'-phosphate
  modified_base 14: mod_base = OTHER; note = 2'-deoxy-2'-fluoroguanosine-3'-phosphate
  modified_base 15: mod_base = OTHER; note = 2'-O-methylguanosine-3'-phosphate
  modified_base 16: mod_base = OTHER; note = 2'-deoxy-2'-fluorouridine-3'-phosphate
  modified_base 17: mod_base = OTHER; note = 2'-O-methyluridine-3'-phosphate
  modified_base 18: mod_base = OTHER; note = 2'-deoxy-2'-fluoroadenosine-3'-phosphate
  modified_base 19: mod_base = OTHER; note = 2'-O-methylcytidine-3'-phosphate
  modified_base 20: mod_base = OTHER; note = 2'-deoxy-2'-fluoroadenosine-3'-phosphate
  modified_base 21: mod_base = OTHER; note = 2'-O-methyluridine-3'-phosphorothioate
  modified_base 22: mod_base = OTHER; note = 2'-deoxy-2'-fluoroguanosine-3'-phosphorothioate
  modified_base 23: mod_base = OTHER; note = 2'-O-methyladenosine
atggaatactcttggttacatga

SEQ ID NO: 625 - RNA, 23 nt, synthetic construct
  source 1..23: mol_type = other RNA
  modified_base 1: mod_base = OTHER; note = 2'-O-methyladenosine-3'-phosphate
  modified_base 2: mod_base = OTHER; note = 2'-O-methyluridine-3'-phosphate
  modified_base 3: mod_base = OTHER; note = 2'-O-methylguanosine-3'-phosphate
  modified_base 4: mod_base = OTHER; note = 2'-deoxy-2'-fluoroguanosine-3'-phosphate
  modified_base 5: mod_base = OTHER; note = 2'-O-methyladenosine-3'-phosphate
  modified_base 6: mod_base = OTHER; note = 2'-deoxy-2'-fluoroadenosine-3'-phosphate
  modified_base 7: mod_base = OTHER; note = 2'-O-methyluridine-3'-phosphate
  modified_base 8: mod_base = OTHER; note = 2'-deoxy-2'-fluoroadenosine-3'-phosphate
  modified_base 9: mod_base = OTHER; note = 2'-O-methylcytidine-3'-phosphate
  modified_base 10: mod_base = OTHER; note = 2'-deoxy-2'-fluorouridine-3'-phosphate
  modified_base 11: mod_base = OTHER; note = 2'-deoxy-2'-fluorocytidine-3'-phosphate
  modified_base 12: mod_base = OTHER; note = 2'-deoxy-2'-fluorouridine-3'-phosphate
  modified_base 13: mod_base = OTHER; note = 2'-O-methyluridine-3'-phosphate
  modified_base 14: mod_base = OTHER; note = 2'-deoxy-2'-fluoroguanosine-3'-phosphate
  modified_base 15: mod_base = OTHER; note = 2'-O-methylguanosine-3'-phosphate
  modified_base 16: mod_base = OTHER; note = 2'-deoxy-2'-fluorouridine-3'-phosphate
  modified_base 17: mod_base = OTHER; note = 2'-O-methyluridine-3'-phosphate
  modified_base 18: mod_base = OTHER; note = 2'-deoxy-2'-fluoroadenosine-3'-phosphate
  modified_base 19: mod_base = OTHER; note = 2'-O-methylcytidine-3'-phosphate
  modified_base 20: mod_base = OTHER; note = 2'-deoxy-2'-fluoroadenosine-3'-phosphate
  modified_base 21: mod_base = OTHER; note = 2'-O-methyluridine-3'-phosphorothioate
  modified_base 22: mod_base = OTHER; note = 2'-deoxy-2'-fluoroguanosine-3'-phosphorothioate
  modified_base 23: mod_base = OTHER; note = 2'-O-methyladenosine
atggaatactcttggttacatga

SEQ ID NO: 626 - RNA, 23 nt, synthetic construct
  source 1..23: mol_type = other RNA
  modified_base 1: mod_base = OTHER; note = 2'-O-methyladenosine-3'-phosphate
  modified_base 2: mod_base = OTHER; note = 2'-deoxy-2'-fluorouridine-3'-phosphate
  modified_base 3: mod_base = OTHER; note = 2'-O-methylguanosine-3'-phosphate
  modified_base 4: mod_base = OTHER; note = 2'-deoxy-2'-fluoroguanosine-3'-phosphate
  modified_base 5: mod_base = OTHER; note = 2'-O-methyladenosine-3'-phosphate
  modified_base 6: mod_base = OTHER; note = 2'-deoxy-2'-fluoroadenosine-3'-phosphate
  modified_base 7: mod_base = OTHER; note = 2'-O-methyluridine-3'-phosphate
  modified_base 8: mod_base = OTHER; note = 2'-deoxy-2'-fluoroadenosine-3'-phosphate
  modified_base 9: mod_base = OTHER; note = 2'-O-methylcytidine-3'-phosphate
  modified_base 10: mod_base = OTHER; note = 2'-deoxy-2'-fluorouridine-3'-phosphate
  modified_base 11: mod_base = OTHER; note = 2'-O-methylcytidine-3'-phosphate
  modified_base 12: mod_base = OTHER; note = 2'-deoxy-2'-fluorouridine-3'-phosphate
  modified_base 13: mod_base = OTHER; note = 2'-O-methyluridine-3'-phosphate
  modified_base 14: mod_base = OTHER; note = 2'-deoxy-2'-fluoroguanosine-3'-phosphate
  modified_base 15: mod_base = OTHER; note = 2'-O-methylguanosine-3'-phosphate
  modified_base 16: mod_base = OTHER; note = 2'-deoxy-2'-fluorouridine-3'-phosphate
  modified_base 17: mod_base = OTHER; note = 2'-O-methyluridine-3'-phosphate
  modified_base 18: mod_base = OTHER; note = 2'-deoxy-2'-fluoroadenosine-3'-phosphate
  modified_base 19: mod_base = OTHER; note = 2'-O-methylcytidine-3'-phosphate
  modified_base 20: mod_base = OTHER; note = 2'-deoxy-2'-fluoroadenosine-3'-phosphate
  modified_base 21: mod_base = OTHER; note = 2'-O-methyluridine-3'-phosphorothioate
  modified_base 22: mod_base = OTHER; note = 2'-deoxy-2'-fluoroguanosine-3'-phosphorothioate
  modified_base 23: mod_base = OTHER; note = 2'-O-methyladenosine
atggaatactcttggttacatga

SEQ ID NO: 627 - RNA, 23 nt, synthetic construct
  source 1..23: mol_type = other RNA
  modified_base 1: mod_base = OTHER; note = 2'-O-methyladenosine-3'-phosphate
  modified_base 2: mod_base = OTHER; note = 2'-O-methyluridine-3'-phosphate
  modified_base 3: mod_base = OTHER; note = 2'-O-methylguanosine-3'-phosphate
  modified_base 4: mod_base = OTHER; note = 2'-deoxy-2'-fluoroguanosine-3'-phosphate
  modified_base 5: mod_base = OTHER; note = 2'-O-methyladenosine-3'-phosphate
  modified_base 6: mod_base = OTHER; note = 2'-deoxy-2'-fluoroadenosine-3'-phosphate
  modified_base 7: mod_base = OTHER; note = 2'-O-methyluridine-3'-phosphate
  modified_base 8: mod_base = OTHER; note = 2'-deoxy-2'-fluoroadenosine-3'-phosphate
  modified_base 9: mod_base = OTHER; note = 2'-deoxy-2'-fluorocytidine-3'-phosphate
  modified_base 10: mod_base = OTHER; note = 2'-deoxy-2'-fluorouridine-3'-phosphate
  modified_base 11: mod_base = OTHER; note = 2'-O-methylcytidine-3'-phosphate
  modified_base 12: mod_base = OTHER; note = 2'-deoxy-2'-fluorouridine-3'-phosphate
  modified_base 13: mod_base = OTHER; note = 2'-O-methyluridine-3'-phosphate
  modified_base 14: mod_base = OTHER; note = 2'-deoxy-2'-fluoroguanosine-3'-phosphate
  modified_base 15: mod_base = OTHER; note = 2'-O-methylguanosine-3'-phosphate
  modified_base 16: mod_base = OTHER; note = 2'-deoxy-2'-fluorouridine-3'-phosphate
  modified_base 17: mod_base = OTHER; note = 2'-O-methyluridine-3'-phosphate
  modified_base 18: mod_base = OTHER; note = 2'-deoxy-2'-fluoroadenosine-3'-phosphate
  modified_base 19: mod_base = OTHER; note = 2'-O-methylcytidine-3'-phosphate
  modified_base 20: mod_base = OTHER; note = 2'-deoxy-2'-fluoroadenosine-3'-phosphate
  modified_base 21: mod_base = OTHER; note = 2'-O-methyluridine-3'-phosphorothioate
  modified_base 22: mod_base = OTHER; note = 2'-deoxy-2'-fluoroguanosine-3'-phosphorothioate
  modified_base 23: mod_base = OTHER; note = 2'-O-methyladenosine
atggaatactcttggttacatga

SEQ ID NO: 628 - RNA, 23 nt, synthetic construct
  source 1..23: mol_type = other RNA
  modified_base 1: mod_base = OTHER; note = 2'-O-methyladenosine-3'-phosphate
  modified_base 2: mod_base = OTHER; note = 2'-deoxy-2'-fluorouridine-3'-phosphate
  modified_base 3: mod_base = OTHER; note = 2'-O-methylguanosine-3'-phosphate
  modified_base 4: mod_base = OTHER; note = 2'-deoxy-2'-fluoroguanosine-3'-phosphate
  modified_base 5: mod_base = OTHER; note = 2'-O-methyladenosine-3'-phosphate
  modified_base 6: mod_base = OTHER; note = 2'-deoxy-2'-fluoroadenosine-3'-phosphate
  modified_base 7: mod_base = OTHER; note = 2'-O-methyluridine-3'-phosphate
  modified_base 8: mod_base = OTHER; note = 2'-deoxy-2'-fluoroadenosine-3'-phosphate
  modified_base 9: mod_base = OTHER; note = 2'-O-methylcytidine-3'-phosphate
  modified_base 10: mod_base = OTHER; note = 2'-deoxy-2'-fluorouridine-3'-phosphate
  modified_base 11: mod_base = OTHER; note = 2'-O-methylcytidine-3'-phosphate
  modified_base 12: mod_base = OTHER; note = 2'-deoxy-2'-fluorouridine-3'-phosphate
  modified_base 13: mod_base = OTHER; note = 2'-O-methyluridine-3'-phosphate
  modified_base 14: mod_base = OTHER; note = 2'-deoxy-2'-fluoroguanosine-3'-phosphate
  modified_base 15: mod_base = OTHER; note = 2'-O-methylguanosine-3'-phosphate
  modified_base 16: mod_base = OTHER; note = 2'-deoxy-2'-fluorouridine-3'-phosphate
  modified_base 17: mod_base = OTHER; note = 2'-O-methyluridine-3'-phosphate
  modified_base 18: mod_base = OTHER; note = 2'-deoxy-2'-fluoroadenosine-3'-phosphate
  modified_base 19: mod_base = OTHER; note = 2'-O-methylcytidine-3'-phosphate
  modified_base 20: mod_base = OTHER; note = 2'-deoxy-2'-fluoroadenosine-3'-phosphate
  modified_base 21: mod_base = OTHER; note = 2'-O-methyluridine-3'-phosphorothioate
  modified_base 22: mod_base = OTHER; note = 2'-deoxy-2'-fluoroguanosine-3'-phosphorothioate
  modified_base 23: mod_base = OTHER; note = 2'-O-methyladenosine
atggaatactcttggttacatga

SEQ ID NO: 629 - DNA, 23 bp, synthetic construct
  source 1..23: mol_type = other DNA
  modified_base 1: mod_base = OTHER; note = 2'-O-methyladenosine-3'-phosphate
  modified_base 4: mod_base = OTHER; note = 2'-deoxy-2'-fluoroguanosine-3'-phosphate
  modified_base 5: mod_base = OTHER; note = 2'-O-methyladenosine-3'-phosphate
  modified_base 6: mod_base = OTHER; note = 2'-deoxy-2'-fluoroadenosine-3'-phosphate
  modified_base 7: mod_base = OTHER; note = 2'-O-methyluridine-3'-phosphate
  modified_base 10: mod_base = OTHER; note = 2'-deoxy-2'-fluorouridine-3'-phosphate
  modified_base 11: mod_base = OTHER; note = 2'-O-methylcytidine-3'-phosphate
  modified_base 12: mod_base = OTHER; note = 2'-deoxy-2'-fluorouridine-3'-phosphate
  modified_base 13: mod_base = OTHER; note = 2'-O-methyluridine-3'-phosphate
  modified_base 14: mod_base = OTHER; note = 2'-deoxy-2'-fluoroguanosine-3'-phosphate
  modified_base 15: mod_base = OTHER; note = 2'-O-methylguanosine-3'-phosphate
  modified_base 16: mod_base = OTHER; note = 2'-deoxy-2'-fluorouridine-3'-phosphate
  modified_base 17: mod_base = OTHER; note = 2'-O-methyluridine-3'-phosphate
  modified_base 18: mod_base = OTHER; note = 2'-deoxy-2'-fluoroadenosine-3'-phosphate
  modified_base 19: mod_base = OTHER; note = 2'-O-methylcytidine-3'-phosphate
  modified_base 20: mod_base = OTHER; note = 2'-deoxy-2'-fluoroadenosine-3'-phosphate
  modified_base 21: mod_base = OTHER; note = 2'-O-methyluridine-3'-phosphorothioate
  modified_base 22: mod_base = OTHER; note = 2'-deoxy-2'-fluoroguanosine-3'-phosphorothioate
  modified_base 23: mod_base = OTHER; note = 2'-O-methyladenosine
  misc_feature 1: note = RNA
  misc_feature 4..7: note = RNA
  misc_feature 10..23: note = RNA
  misc_feature 2..3: note = DNA
  misc_feature 8..9: note = DNA
atggaatactcttggttacatga

SEQ ID NO: 630 - DNA, 23 bp, synthetic construct
  source 1..23: mol_type = other DNA
  modified_base 1: mod_base = OTHER; note = 2'-O-methyladenosine-3'-phosphate
  modified_base 2: mod_base = OTHER; note = 2'-deoxy-2'-fluorouridine-3'-phosphate
  modified_base 3: mod_base = OTHER; note = 2'-O-methylguanosine-3'-phosphate
  modified_base 4: mod_base = OTHER; note = 2'-deoxy-2'-fluoroguanosine-3'-phosphate
  modified_base 9: mod_base = OTHER; note = 2'-O-methylcytidine-3'-phosphate
  modified_base 10: mod_base = OTHER; note = 2'-deoxy-2'-fluorouridine-3'-phosphate
  modified_base 11: mod_base = OTHER; note = 2'-O-methylcytidine-3'-phosphate
  modified_base 12: mod_base = OTHER; note = 2'-deoxy-2'-fluorouridine-3'-phosphate
  modified_base 13: mod_base = OTHER; note = 2'-O-methyluridine-3'-phosphate
  modified_base 14: mod_base = OTHER; note = 2'-deoxy-2'-fluoroguanosine-3'-phosphate
  modified_base 15: mod_base = OTHER; note = 2'-O-methylguanosine-3'-phosphate
  modified_base 16: mod_base = OTHER; note = 2'-deoxy-2'-fluorouridine-3'-phosphate
  modified_base 17: mod_base = OTHER; note = 2'-O-methyluridine-3'-phosphate
  modified_base 18: mod_base = OTHER; note = 2'-deoxy-2'-fluoroadenosine-3'-phosphate
  modified_base 19: mod_base = OTHER; note = 2'-O-methylcytidine-3'-phosphate
  modified_base 20: mod_base = OTHER; note = 2'-deoxy-2'-fluoroadenosine-3'-phosphate
  modified_base 21: mod_base = OTHER; note = 2'-O-methyluridine-3'-phosphorothioate
  modified_base 22: mod_base = OTHER; note = 2'-deoxy-2'-fluoroguanosine-3'-phosphorothioate
  modified_base 23: mod_base = OTHER; note = 2'-O-methyladenosine
  misc_feature 1..4: note = RNA
  misc_feature 9..23: note = RNA
  misc_feature 5..8: note = DNA
atggaatactcttggttacatga

SEQ ID NO: 631 - DNA, 23 bp, synthetic construct
  source 1..23: mol_type = other DNA
  modified_base 1: mod_base = OTHER; note = 2'-O-methyladenosine-3'-phosphate
  modified_base 6: mod_base = OTHER; note = 2'-deoxy-2'-fluoroadenosine-3'-phosphate
  modified_base 7: mod_base = OTHER; note = 2'-O-methyluridine-3'-phosphate
  modified_base 8: mod_base = OTHER; note = 2'-deoxy-2'-fluoroadenosine-3'-phosphate
  modified_base 9: mod_base = OTHER; note = 2'-O-methylcytidine-3'-phosphate
  modified_base 10: mod_base = OTHER; note = 2'-deoxy-2'-fluorouridine-3'-phosphate
  modified_base 11: mod_base = OTHER; note = 2'-O-methylcytidine-3'-phosphate
  modified_base 12: mod_base = OTHER; note = 2'-deoxy-2'-fluorouridine-3'-phosphate
  modified_base 13: mod_base = OTHER; note = 2'-O-methyluridine-3'-phosphate
  modified_base 14: mod_base = OTHER; note = 2'-deoxy-2'-fluoroguanosine-3'-phosphate
  modified_base 15: mod_base = OTHER; note = 2'-O-methylguanosine-3'-phosphate
  modified_base 16: mod_base = OTHER; note = 2'-deoxy-2'-fluorouridine-3'-phosphate
  modified_base 17: mod_base = OTHER; note = 2'-O-methyluridine-3'-phosphate
  modified_base 18: mod_base = OTHER; note = 2'-deoxy-2'-fluoroadenosine-3'-phosphate
  modified_base 19: mod_base = OTHER; note = 2'-O-methylcytidine-3'-phosphate
  modified_base 20: mod_base = OTHER; note = 2'-deoxy-2'-fluoroadenosine-3'-phosphate
  modified_base 21: mod_base = OTHER; note = 2'-O-methyluridine-3'-phosphorothioate
  modified_base 22: mod_base = OTHER; note = 2'-deoxy-2'-fluoroguanosine-3'-phosphorothioate
  modified_base 23: mod_base = OTHER; note = 2'-O-methyladenosine
  misc_feature 1: note = RNA
  misc_feature 6..23: note = RNA
  misc_feature 2..5: note = DNA
atggaatactcttggttacatga

SEQ ID NO: 632 - DNA, 23 bp, synthetic construct
  source 1..23: mol_type = other DNA
  modified_base 1: mod_base = OTHER; note = 2'-O-methyladenosine-3'-phosphate
  modified_base 4: mod_base = OTHER; note = 2'-deoxy-2'-fluoroguanosine-3'-phosphate
  modified_base 5: mod_base = OTHER; note = 2'-O-methyladenosine-3'-phosphate
  modified_base 6: mod_base = OTHER; note = 2'-deoxy-2'-fluoroadenosine-3'-phosphate
  modified_base 7: mod_base = OTHER; note = 2'-O-methyluridine-3'-phosphate
  modified_base 8: mod_base = OTHER; note = 2'-deoxy-2'-fluoroadenosine-3'-phosphate
  modified_base 11: mod_base = OTHER; note = 2'-O-methylcytidine-3'-phosphate
  modified_base 12: mod_base = OTHER; note = 2'-deoxy-2'-fluorouridine-3'-phosphate
  modified_base 13: mod_base = OTHER; note = 2'-O-methyluridine-3'-phosphate
  modified_base 14: mod_base = OTHER; note = 2'-deoxy-2'-fluoroguanosine-3'-phosphate
  modified_base 15: mod_base = OTHER; note = 2'-O-methylguanosine-3'-phosphate
  modified_base 16: mod_base = OTHER; note = 2'-deoxy-2'-fluorouridine-3'-phosphate
  modified_base 17: mod_base = OTHER; note = 2'-O-methyluridine-3'-phosphate
  modified_base 18: mod_base = OTHER; note = 2'-deoxy-2'-fluoroadenosine-3'-phosphate
  modified_base 19: mod_base = OTHER; note = 2'-O-methylcytidine-3'-phosphate
  modified_base 20: mod_base = OTHER; note = 2'-deoxy-2'-fluoroadenosine-3'-phosphate
  modified_base 21: mod_base = OTHER; note = 2'-O-methyluridine-3'-phosphorothioate
  modified_base 22: mod_base = OTHER; note = 2'-deoxy-2'-fluoroguanosine-3'-phosphorothioate
  modified_base 23: mod_base = OTHER; note = 2'-O-methyladenosine
  misc_feature 1: note = RNA
  misc_feature 4..8: note = RNA
  misc_feature 11..23: note = RNA
  misc_feature 2..3: note = DNA
  misc_feature 9..10: note = DNA
atggaatactcttggttacatga

SEQ ID NO: 633 - DNA, 23 bp, synthetic construct
  source 1..23: mol_type = other DNA
  modified_base 1: mod_base = OTHER; note = 2'-O-methyladenosine-3'-phosphate
  modified_base 2: mod_base = OTHER; note = 2'-deoxy-2'-fluorouridine-3'-phosphate
  modified_base 7: mod_base = OTHER; note = 2'-O-methyluridine-3'-phosphate
  modified_base 8: mod_base = OTHER; note = 2'-deoxy-2'-fluoroadenosine-3'-phosphate
  modified_base 9: mod_base = OTHER; note = 2'-O-methylcytidine-3'-phosphate
  modified_base 10: mod_base = OTHER; note = 2'-deoxy-2'-fluorouridine-3'-phosphate
  modified_base 11: mod_base = OTHER; note = 2'-O-methylcytidine-3'-phosphate
  modified_base 12: mod_base = OTHER; note = 2'-deoxy-2'-fluorouridine-3'-phosphate
  modified_base 13: mod_base = OTHER; note = 2'-O-methyluridine-3'-phosphate
  modified_base 14: mod_base = OTHER; note = 2'-deoxy-2'-fluoroguanosine-3'-phosphate
  modified_base 15: mod_base = OTHER; note = 2'-O-methylguanosine-3'-phosphate
  modified_base 16: mod_base = OTHER; note = 2'-deoxy-2'-fluorouridine-3'-phosphate
  modified_base 17: mod_base = OTHER; note = 2'-O-methyluridine-3'-phosphate
  modified_base 18: mod_base = OTHER; note = 2'-deoxy-2'-fluoroadenosine-3'-phosphate
  modified_base 19: mod_base = OTHER; note = 2'-O-methylcytidine-3'-phosphate
  modified_base 20: mod_base = OTHER; note = 2'-deoxy-2'-fluoroadenosine-3'-phosphate
  modified_base 21: mod_base = OTHER; note = 2'-O-methyluridine-3'-phosphorothioate
  modified_base 22: mod_base = OTHER; note = 2'-deoxy-2'-fluoroguanosine-3'-phosphorothioate
  modified_base 23: mod_base = OTHER; note = 2'-O-methyladenosine
  misc_feature 1..2: note = RNA
  misc_feature 7..23: note = RNA
  misc_feature 3..6: note = DNA
atggaatactcttggttacatga

SEQ ID NO: 634 - RNA, 23 nt, synthetic construct
  source 1..23: mol_type = other RNA
  modified_base 1: mod_base = OTHER; note = 2'-O-methyladenosine-3'-phosphate
  modified_base 2: mod_base = OTHER; note = 2'-deoxy-2'-fluorouridine-3'-phosphate
  modified_base 3: mod_base = OTHER; note = 2'-O-methylguanosine-3'-phosphate
  modified_base 4: mod_base = OTHER; note = 2'-deoxy-2'-fluoroguanosine-3'-phosphate
  modified_base 5: mod_base = OTHER; note = 2'-O-methyladenosine-3'-phosphate
  modified_base 6: mod_base = OTHER; note = 2'-deoxy-2'-fluoroadenosine-3'-phosphate
  modified_base 7: mod_base = OTHER; note = 2'-O-methyluridine-3'-phosphate
  modified_base 8: mod_base = OTHER; note = 2'-deoxy-2'-fluoroadenosine-3'-phosphate
  modified_base 9: mod_base = OTHER; note = 2'-O-methylcytidine-3'-phosphate
  modified_base 10: mod_base = OTHER; note = 2'-deoxy-2'-fluorouridine-3'-phosphate
  modified_base 11: mod_base = OTHER; note = 2'-O-methylcytidine-3'-phosphate
  modified_base 12: mod_base = OTHER; note = 2'-deoxy-2'-fluorouridine-3'-phosphate
  modified_base 13: mod_base = OTHER; note = 2'-O-methyluridine-3'-phosphate
  modified_base 14: mod_base = OTHER; note = 2'-deoxy-2'-fluoroguanosine-3'-phosphate
  modified_base 15: mod_base = OTHER; note = 2'-deoxy-2'-fluoroguanosine-3'-phosphate
  modified_base 16: mod_base = OTHER; note = 2'-deoxy-2'-fluorouridine-3'-phosphate
  modified_base 17: mod_base = OTHER; note = 2'-O-methyluridine-3'-phosphate
  modified_base 18: mod_base = OTHER; note = 2'-deoxy-2'-fluoroadenosine-3'-phosphate
  modified_base 19: mod_base = OTHER; note = 2'-deoxy-2'-fluorocytidine-3'-phosphate
  modified_base 20: mod_base = OTHER; note = 2'-deoxy-2'-fluoroadenosine-3'-phosphate
  modified_base 21: mod_base = OTHER; note = 2'-O-methyluridine-3'-phosphorothioate
  modified_base 22: mod_base = OTHER; note = 2'-deoxy-2'-fluoroguanosine-3'-phosphorothioate
  modified_base 23: mod_base = OTHER; note = 2'-O-methyladenosine
atggaatactcttggttacatga

SEQ ID NO: 635 - DNA, 23 bp, synthetic construct
  source 1..23: mol_type = other DNA
  modified_base 1: mod_base = OTHER; note = 2'-O-methyladenosine-3'-phosphate
  modified_base 2: mod_base = OTHER; note = 2'-deoxy-2'-fluorouridine-3'-phosphate
  modified_base 3: mod_base = OTHER; note = 2'-O-methylguanosine-3'-phosphate
  modified_base 8: mod_base = OTHER; note = 2'-deoxy-2'-fluoroadenosine-3'-phosphate
  modified_base 9: mod_base = OTHER; note = 2'-O-methylcytidine-3'-phosphate
  modified_base 10: mod_base = OTHER; note = 2'-deoxy-2'-fluorouridine-3'-phosphate
  modified_base 11: mod_base = OTHER; note = 2'-O-methylcytidine-3'-phosphate
  modified_base 12: mod_base = OTHER; note = 2'-deoxy-2'-fluorouridine-3'-phosphate
  modified_base 13: mod_base = OTHER; note = 2'-O-methyluridine-3'-phosphate
  modified_base 14: mod_base = OTHER; note = 2'-deoxy-2'-fluoroguanosine-3'-phosphate
  modified_base 15: mod_base = OTHER; note = 2'-O-methylguanosine-3'-phosphate
  modified_base 16: mod_base = OTHER; note = 2'-deoxy-2'-fluorouridine-3'-phosphate
  modified_base 17: mod_base = OTHER; note = 2'-O-methyluridine-3'-phosphate
  modified_base 18: mod_base = OTHER; note = 2'-deoxy-2'-fluoroadenosine-3'-phosphate
  modified_base 19: mod_base = OTHER; note = 2'-O-methylcytidine-3'-phosphate
  modified_base 20: mod_base = OTHER; note = 2'-deoxy-2'-fluoroadenosine-3'-phosphate
  modified_base 21: mod_base = OTHER; note = 2'-O-methyluridine-3'-phosphorothioate
  modified_base 22: mod_base = OTHER; note = 2'-deoxy-2'-fluoroguanosine-3'-phosphorothioate
  modified_base 23: mod_base = OTHER; note = 2'-O-methyladenosine
  misc_feature 1..3: note = RNA
  misc_feature 8..23: note = RNA
  misc_feature 4..7: note = DNA
atggaatactcttggttacatga

SEQ ID NO: 636 - DNA, 23 bp, synthetic construct
  source 1..23: mol_type = other DNA
  modified_base 1: mod_base = OTHER; note = 2'-O-methyladenosine-3'-phosphate
  modified_base 2: mod_base = OTHER; note = 2'-deoxy-2'-fluorouridine-3'-phosphate
  modified_base 3: mod_base = OTHER; note = 2'-O-methylguanosine-3'-phosphate
  modified_base 4: mod_base = OTHER; note = 2'-deoxy-2'-fluoroguanosine-3'-phosphate
  modified_base 5: mod_base = OTHER; note = 2'-O-methyladenosine-3'-phosphate
  modified_base 10: mod_base = OTHER; note = 2'-deoxy-2'-fluorouridine-3'-phosphate
  modified_base 11: mod_base = OTHER; note = 2'-O-methylcytidine-3'-phosphate
  modified_base 12: mod_base = OTHER; note = 2'-deoxy-2'-fluorouridine-3'-phosphate
  modified_base 13: mod_base = OTHER; note = 2'-O-methyluridine-3'-phosphate
  modified_base 14: mod_base = OTHER; note = 2'-deoxy-2'-fluoroguanosine-3'-phosphate
  modified_base 15: mod_base = OTHER; note = 2'-O-methylguanosine-3'-phosphate
  modified_base 16: mod_base = OTHER; note = 2'-deoxy-2'-fluorouridine-3'-phosphate
  modified_base 17: mod_base = OTHER; note = 2'-O-methyluridine-3'-phosphate
  modified_base 18: mod_base = OTHER; note = 2'-deoxy-2'-fluoroadenosine-3'-phosphate
  modified_base 19: mod_base = OTHER; note = 2'-O-methylcytidine-3'-phosphate
  modified_base 20: mod_base = OTHER; note = 2'-deoxy-2'-fluoroadenosine-3'-phosphate
  modified_base 21: mod_base = OTHER; note = 2'-O-methyluridine-3'-phosphorothioate
  modified_base 22: mod_base = OTHER; note = 2'-deoxy-2'-fluoroguanosine-3'-phosphorothioate
  modified_base 23: mod_base = OTHER; note = 2'-O-methyladenosine
  misc_feature 1..5: note = RNA
  misc_feature 10..23: note = RNA
  misc_feature 6..9: note = DNA
atggaatactcttggttacatga

SEQ ID NO: 637 - DNA, 23 bp, synthetic construct
  source 1..23: mol_type = other DNA
  modified_base 1: mod_base = OTHER; note = 2'-O-methyladenosine-3'-phosphate
  modified_base 2: mod_base = OTHER; note = 2'-deoxy-2'-fluorouridine-3'-phosphate
  modified_base 3: mod_base = OTHER; note = 2'-O-methylguanosine-3'-phosphate
  modified_base 4: mod_base = OTHER; note = 2'-deoxy-2'-fluoroguanosine-3'-phosphate
  modified_base 5: mod_base = OTHER; note = 2'-O-methyladenosine-3'-phosphate
  modified_base 6: mod_base = OTHER; note = 2'-deoxy-2'-fluoroadenosine-3'-phosphate
  modified_base 7: mod_base = OTHER; note = 2'-O-methyluridine-3'-phosphate
  modified_base 8: mod_base = OTHER; note = 2'-deoxy-2'-fluoroadenosine-3'-phosphate
  modified_base 9: mod_base = OTHER; note = 2'-O-methylcytidine-3'-phosphate
  modified_base 10: mod_base = OTHER; note = 2'-deoxy-2'-fluorouridine-3'-phosphate
  modified_base 11: mod_base = OTHER; note = 2'-O-methylcytidine-3'-phosphate
  modified_base 12: mod_base = OTHER; note = 2'-deoxy-2'-fluorouridine-3'-phosphate
  modified_base 13: mod_base = OTHER; note = 2'-O-methyluridine-3'-phosphate
  modified_base 14: mod_base = OTHER; note = 2'-O-methylguanosine-3'-phosphate
  modified_base 16: mod_base = OTHER; note = 2'-O-methyluridine-3'-phosphate
  modified_base 18: mod_base = OTHER; note = 2'-O-methyladenosine-3'-phosphate
  modified_base 20: mod_base = OTHER; note = 2'-O-methyladenosine-3'-phosphate
  modified_base 21: mod_base = OTHER; note = 2'-deoxythymidine-3'-phosphorothioate
  modified_base 22: mod_base = OTHER; note = 2'-O-methylguanosine-3'-phosphorothioate
  modified_base 23: mod_base = OTHER; note = 2'-O-methyladenosine
  misc_feature 1..14: note = RNA
  misc_feature 16: note = RNA
  misc_feature 18: note = RNA
  misc_feature 20: note = RNA
  misc_feature 22..23: note = RNA
  misc_feature 15: note = DNA
  misc_feature 17: note = DNA
  misc_feature 19: note = DNA
  misc_feature 21: note = DNA
atggaatactcttggttacatga

SEQ ID NO: 638 - DNA, 23 bp, synthetic construct
  source 1..23: mol_type = other DNA
  modified_base 1: mod_base = OTHER; note = 2'-O-methyladenosine-3'-phosphate
  modified_base 6: mod_base = OTHER; note = 2'-deoxy-2'-fluoroadenosine-3'-phosphate
  modified_base 7: mod_base = OTHER; note = 2'-O-methyluridine-3'-phosphate
  modified_base 8: mod_base = OTHER; note = 2'-deoxy-2'-fluoroadenosine-3'-phosphate
  modified_base 9: mod_base = OTHER; note = 2'-O-methylcytidine-3'-phosphate
  modified_base 10: mod_base = OTHER; note = 2'-deoxy-2'-fluorouridine-3'-phosphate
  modified_base 11: mod_base = OTHER; note = 2'-O-methylcytidine-3'-phosphate
  modified_base 12: mod_base = OTHER; note = 2'-deoxy-2'-fluorouridine-3'-phosphate
  modified_base 13: mod_base = OTHER; note = 2'-O-methyluridine-3'-phosphate
  modified_base 14: mod_base = OTHER; note = 2'-deoxy-2'-fluoroguanosine-3'-phosphate
  modified_base 15: mod_base = OTHER; note = 2'-O-methylguanosine-3'-phosphate
  modified_base 16: mod_base = OTHER; note = 2'-deoxy-2'-fluorouridine-3'-phosphate
  modified_base 17: mod_base = OTHER; note = 2'-O-methyluridine-3'-phosphate
  modified_base 18: mod_base = OTHER; note = 2'-deoxy-2'-fluoroadenosine-3'-phosphate
  modified_base 19: mod_base = OTHER; note = 2'-O-methylcytidine-3'-phosphate
  modified_base 20: mod_base = OTHER; note = 2'-deoxy-2'-fluoroadenosine-3'-phosphate
  modified_base 21: mod_base = OTHER; note = 2'-O-methyluridine-3'-phosphorothioate
  modified_base 22: mod_base = OTHER; note = 2'-deoxy-2'-fluoroguanosine-3'-phosphorothioate
  modified_base 23: mod_base = OTHER; note = 2'-O-methyladenosine
  misc_feature 1: note = RNA
  misc_feature 6..23: note = RNA
  misc_feature 2..5: note = DNA
atggaatactcttggttacatga

SEQ ID NO: 639 - RNA, 23 nt, synthetic construct
  source 1..23: mol_type = other RNA
  modified_base 1: mod_base = OTHER; note = 2'-O-methyladenosine-3'-phosphate
  modified_base 2: mod_base = OTHER; note = 2'-deoxy-2'-fluorouridine-3'-phosphate
  modified_base 3: mod_base = OTHER; note = 2'-O-methylguanosine-3'-phosphate
  modified_base 4: mod_base = OTHER; note = 2'-deoxy-2'-fluoroguanosine-3'-phosphate
  modified_base 5: mod_base = OTHER; note = 2'-O-methyladenosine-3'-phosphate
  modified_base 6: mod_base = OTHER; note = 2'-deoxy-2'-fluoroadenosine-3'-phosphate
  modified_base 7: mod_base = OTHER; note = 2'-O-methyluridine-3'-phosphate
  modified_base 8: mod_base = OTHER; note = 2'-deoxy-2'-fluoroadenosine-3'-phosphate
  modified_base 9: mod_base = OTHER; note = 2'-O-methylcytidine-3'-phosphate
  modified_base 10: mod_base = OTHER; note = 2'-deoxy-2'-fluorouridine-3'-phosphate
  modified_base 11: mod_base = OTHER; note = 2'-O-methylcytidine-3'-phosphate
  modified_base 12: mod_base = OTHER; note = 2'-deoxy-2'-fluorouridine-3'-phosphate
  modified_base 13: mod_base = OTHER; note = 2'-O-methyluridine-3'-phosphate
  modified_base 14: mod_base = OTHER; note = 2'-deoxy-2'-fluoroguanosine-3'-phosphate
  modified_base 15: mod_base = OTHER; note = 2'-O-methylguanosine-3'-phosphate
  modified_base 16: mod_base = OTHER; note = 2'-deoxy-2'-fluorouridine-3'-phosphate
  modified_base 17: mod_base = OTHER; note = 2'-O-methyluridine-3'-phosphate
  modified_base 18: mod_base = OTHER; note = 2'-deoxy-2'-fluoroadenosine-3'-phosphate
  modified_base 19: mod_base = OTHER; note = 2'-O-methylcytidine-3'-phosphate
  modified_base 20: mod_base = OTHER; note = 2'-deoxy-2'-fluoroadenosine-3'-phosphate
  modified_base 21: mod_base = OTHER; note = 2'-O-methyluridine-3'-phosphorothioate
  modified_base 22: mod_base = OTHER; note = 2'-deoxy-2'-fluoroguanosine-3'-phosphorothioate
  modified_base 23: mod_base = OTHER; note = 2'-O-methyladenosine
atggaatactcttggttacatga

SEQ ID NO: 640 - DNA, 23 bp, synthetic construct
  source 1..23: mol_type = other DNA
  modified_base 1: mod_base = OTHER; note = 2'-O-methyladenosine-3'-phosphate
  modified_base 2: mod_base = OTHER; note = 2'-deoxy-2'-fluorouridine-3'-phosphate
  modified_base 7: mod_base = OTHER; note = 2'-O-methyluridine-3'-phosphate
  modified_base 8: mod_base = OTHER; note = 2'-deoxy-2'-fluoroadenosine-3'-phosphate
  modified_base 9: mod_base = OTHER; note = 2'-O-methylcytidine-3'-phosphate
  modified_base 10: mod_base = OTHER; note = 2'-deoxy-2'-fluorouridine-3'-phosphate
  modified_base 11: mod_base = OTHER; note = 2'-O-methylcytidine-3'-phosphate
  modified_base 12: mod_base = OTHER; note = 2'-deoxy-2'-fluorouridine-3'-phosphate
  modified_base 13: mod_base = OTHER; note = 2'-O-methyluridine-3'-phosphate
  modified_base 14: mod_base = OTHER; note = 2'-deoxy-2'-fluoroguanosine-3'-phosphate
  modified_base 15: mod_base = OTHER; note = 2'-O-methylguanosine-3'-phosphate
  modified_base 16: mod_base = OTHER; note = 2'-deoxy-2'-fluorouridine-3'-phosphate
  modified_base 17: mod_base = OTHER; note = 2'-O-methyluridine-3'-phosphate
  modified_base 18: mod_base = OTHER; note = 2'-deoxy-2'-fluoroadenosine-3'-phosphate
  modified_base 19: mod_base = OTHER; note = 2'-O-methylcytidine-3'-phosphate
  modified_base 20: mod_base = OTHER; note = 2'-deoxy-2'-fluoroadenosine-3'-phosphate
  modified_base 21: mod_base = OTHER; note = 2'-O-methyluridine-3'-phosphorothioate
  modified_base 22: mod_base = OTHER; note = 2'-deoxy-2'-fluoroguanosine-3'-phosphorothioate
  modified_base 23: mod_base = OTHER; note = 2'-O-methyladenosine
  misc_feature 1..2: note = RNA
  misc_feature 7..23: note = RNA
  misc_feature 3..6: note = DNA
atggaatactcttggttacatga

SEQ ID NO: 641 - RNA, 23 nt, synthetic construct
  source 1..23: mol_type = other RNA
  modified_base 1: mod_base = OTHER; note = 2'-O-methyladenosine-3'-phosphate
  modified_base 2: mod_base = OTHER; note = 2'-deoxy-2'-fluorouridine-3'-phosphate
  modified_base 3: mod_base = OTHER; note = 2'-O-methylguanosine-3'-phosphate
  modified_base 4: mod_base = OTHER; note = 2'-deoxy-2'-fluoroguanosine-3'-phosphate
  modified_base 5: mod_base = OTHER; note = 2'-O-methyladenosine-3'-phosphate
  modified_base 6: mod_base = OTHER; note = 2'-deoxy-2'-fluoroadenosine-3'-phosphate
  modified_base 7: mod_base = OTHER; note = 2'-O-methyluridine-3'-phosphate
  modified_base 8: mod_base = OTHER; note = 2'-O-methyladenosine-3'-phosphate
  modified_base 9: mod_base = OTHER; note = 2'-O-methylcytidine-3'-phosphate
  modified_base 10: mod_base = OTHER; note = 2'-O-methyluridine-3'-phosphate
  modified_base 11: mod_base = OTHER; note = 2'-O-methylcytidine-3'-phosphate
  modified_base 12: mod_base = OTHER; note = 2'-O-methyluridine-3'-phosphate
  modified_base 13: mod_base = OTHER; note = 2'-O-methyluridine-3'-phosphate
  modified_base 14: mod_base = OTHER; note = 2'-O-methylguanosine-3'-phosphate
  modified_base 15: mod_base = OTHER; note = 2'-O-methylguanosine-3'-phosphate
  modified_base 16: mod_base = OTHER; note = 2'-deoxy-2'-fluorouridine-3'-phosphate
  modified_base 17: mod_base = OTHER; note = 2'-O-methyluridine-3'-phosphate
  modified_base 18: mod_base = OTHER; note = 2'-deoxy-2'-fluoroadenosine-3'-phosphate
  modified_base 19: mod_base = OTHER; note = 2'-O-methylcytidine-3'-phosphate
  modified_base 20: mod_base = OTHER; note = 2'-deoxy-2'-fluoroadenosine-3'-phosphate
  modified_base 21: mod_base = OTHER; note = 2'-O-methyluridine-3'-phosphorothioate
  modified_base 22: mod_base = OTHER; note = 2'-O-methylguanosine-3'-phosphorothioate
  modified_base 23: mod_base = OTHER; note = 2'-O-methyladenosine
atggaatactcttggttacatga

SEQ ID NO: 642 - RNA, 23 nt, synthetic construct
  source 1..23: mol_type = other RNA
  modified_base 1: mod_base = OTHER; note = 2'-O-methyladenosine-3'-phosphate
  modified_base 2: mod_base = OTHER; note = 2'-deoxy-2'-fluorouridine-3'-phosphate
  modified_base 3: mod_base = OTHER; note = 2'-O-methylguanosine-3'-phosphate
  modified_base 4: mod_base = OTHER; note = 2'-deoxy-2'-fluoroguanosine-3'-phosphate
  modified_base 5: mod_base = OTHER; note = 2'-O-methyladenosine-3'-phosphate
  modified_base 6: mod_base = OTHER; note = 2'-deoxy-2'-fluoroadenosine-3'-phosphate
  modified_base 7: mod_base = OTHER; note = 2'-O-methyluridine-3'-phosphate
  modified_base 8: mod_base = OTHER; note = 2'-deoxy-2'-fluoroadenosine-3'-phosphate
  modified_base 9: mod_base = OTHER; note = 2'-deoxy-2'-fluorocytidine-3'-phosphate
  modified_base 10: mod_base = OTHER; note = 2'-deoxy-2'-fluorouridine-3'-phosphate
  modified_base 11: mod_base = OTHER; note = 2'-deoxy-2'-fluorocytidine-3'-phosphate
  modified_base 12: mod_base = OTHER; note = 2'-deoxy-2'-fluorouridine-3'-phosphate
  modified_base 13: mod_base = OTHER; note = 2'-O-methyluridine-3'-phosphate
  modified_base 14: mod_base = OTHER; note = 2'-deoxy-2'-fluoroguanosine-3'-phosphate
  modified_base 15: mod_base = OTHER; note = 2'-deoxy-2'-fluoroguanosine-3'-phosphate
  modified_base 16: mod_base = OTHER; note = 2'-O-methyluridine-3'-phosphate
  modified_base 17: mod_base = OTHER; note = 2'-O-methyluridine-3'-phosphate
  modified_base 18: mod_base = OTHER; note = 2'-deoxy-2'-fluoroadenosine-3'-phosphate
  modified_base 19: mod_base = OTHER; note = 2'-O-methylcytidine-3'-phosphate
  modified_base 20: mod_base = OTHER; note = 2'-deoxy-2'-fluoroadenosine-3'-phosphate
  modified_base 21: mod_base = OTHER; note = 2'-O-methyluridine-3'-phosphorothioate
  modified_base 22: mod_base = OTHER; note = 2'-O-methylguanosine-3'-phosphorothioate
  modified_base 23: mod_base = OTHER; note = 2'-O-methyladenosine
atggaatactcttggttacatga

SEQ ID NO: 643 - RNA, 23 nt, synthetic construct
  source 1..23: mol_type = other RNA
  modified_base 1: mod_base = OTHER; note = 2'-O-methyladenosine-3'-phosphate
  modified_base 2: mod_base = OTHER; note = 2'-deoxy-2'-fluorouridine-3'-phosphate
  modified_base 3: mod_base = OTHER; note = 2'-deoxy-2'-fluoroguanosine-3'-phosphate
  modified_base 4: mod_base = OTHER; note = 2'-O-methylguanosine-3'-phosphate
  modified_base 5: mod_base = OTHER; note = 2'-O-methyladenosine-3'-phosphate
  modified_base 6: mod_base = OTHER; note = 2'-deoxy-2'-fluoroadenosine-3'-phosphate
  modified_base 7: mod_base = OTHER; note = 2'-deoxy-2'-fluorouridine-3'-phosphate
  modified_base 8: mod_base = OTHER; note = 2'-O-methyladenosine-3'-phosphate
  modified_base 9: mod_base = OTHER; note = 2'-O-methylcytidine-3'-phosphate
  modified_base 10: mod_base = OTHER; note = 2'-deoxy-2'-fluorouridine-3'-phosphate
  modified_base 11: mod_base = OTHER; note = 2'-deoxy-2'-fluorocytidine-3'-phosphate
  modified_base 12: mod_base = OTHER; note = 2'-O-methyluridine-3'-phosphate
  modified_base 13: mod_base = OTHER; note = 2'-O-methyluridine-3'-phosphate
  modified_base 14: mod_base = OTHER; note = 2'-deoxy-2'-fluoroguanosine-3'-phosphate
  modified_base 15: mod_base = OTHER; note = 2'-deoxy-2'-fluoroguanosine-3'-phosphate
  modified_base 16: mod_base = OTHER; note = 2'-O-methyluridine-3'-phosphate
  modified_base 17: mod_base = OTHER; note = 2'-O-methyluridine-3'-phosphate
  modified_base 18: mod_base = OTHER; note = 2'-deoxy-2'-fluoroadenosine-3'-phosphate
  modified_base 19: mod_base = OTHER; note = 2'-deoxy-2'-fluorocytidine-3'-phosphate
  modified_base 20: mod_base = OTHER; note = 2'-O-methyladenosine-3'-phosphate
  modified_base 21: mod_base = OTHER; note = 2'-O-methyluridine-3'-phosphorothioate
  modified_base 22: mod_base = OTHER; note = 2'-deoxy-2'-fluoroguanosine-3'-phosphorothioate
  modified_base 23: mod_base = OTHER; note = 2'-O-methyladenosine
atggaatactcttggttacatga

SEQ ID NO: 644 - RNA, 23 nt, synthetic construct
  source 1..23: mol_type = other RNA
  modified_base 1: mod_base = OTHER; note = 2'-O-methyladenosine-3'-phosphate
  modified_base 2: mod_base = OTHER; note = 2'-deoxy-2'-fluorouridine-3'-phosphate
  modified_base 3: mod_base = OTHER; note = 2'-O-methylguanosine-3'-phosphate
  modified_base 4: mod_base = OTHER; note = 2'-deoxy-2'-fluoroguanosine-3'-phosphate
  modified_base 5: mod_base = OTHER; note = 2'-O-methyladenosine-3'-phosphate
  modified_base 6: mod_base = OTHER; note = 2'-deoxy-2'-fluoroadenosine-3'-phosphate
  modified_base 7: mod_base = OTHER; note = 2'-O-methyluridine-3'-phosphate
  modified_base 8: mod_base = OTHER; note = 2'-O-methyladenosine-3'-phosphate
  modified_base 9: mod_base = OTHER; note = 2'-deoxy-2'-fluorocytidine-3'-phosphate
  modified_base 10: mod_base = OTHER; note = 2'-deoxy-2'-fluorouridine-3'-phosphate
  modified_base 11: mod_base = OTHER; note = 2'-O-methylcytidine-3'-phosphate
  modified_base 12: mod_base = OTHER; note = 2'-deoxy-2'-fluorouridine-3'-phosphate
  modified_base 13: mod_base = OTHER; note = 2'-deoxy-2'-fluorouridine-3'-phosphate
  modified_base 14: mod_base = OTHER; note = 2'-O-methylguanosine-3'-phosphate
  modified_base 15: mod_base = OTHER; note = 2'-deoxy-2'-fluoroguanosine-3'-phosphate
  modified_base 16: mod_base = OTHER; note = 2'-O-methyluridine-3'-phosphate
  modified_base 17: mod_base = OTHER; note = 2'-O-methyluridine-3'-phosphate
  modified_base 18: mod_base = OTHER; note = 2'-deoxy-2'-fluoroadenosine-3'-phosphate
  modified_base 19: mod_base = OTHER; note = 2'-O-methylcytidine-3'-phosphate
  modified_base 20: mod_base = OTHER; note = 2'-deoxy-2'-fluoroadenosine-3'-phosphate
  modified_base 21: mod_base = OTHER; note = 2'-O-methyluridine-3'-phosphorothioate
  modified_base 22: mod_base = OTHER; note = 2'-O-methylguanosine-3'-phosphorothioate
  modified_base 23: mod_base = OTHER; note = 2'-O-methyladenosine
atggaatactcttggttacatga

SEQ ID NO: 645 - RNA, 23 nt, synthetic construct
  source 1..23: mol_type = other RNA
  modified_base 1: mod_base = OTHER; note = 2'-O-methyladenosine-3'-phosphate
  modified_base 2: mod_base = OTHER; note = 2'-deoxy-2'-fluorouridine-3'-phosphate
  modified_base 3: mod_base = OTHER; note = 2'-O-methylguanosine-3'-phosphate
  modified_base 4: mod_base = OTHER; note = 2'-deoxy-2'-fluoroguanosine-3'-phosphate
  modified_base 5: mod_base = OTHER; note = 2'-O-methyladenosine-3'-phosphate
  modified_base 6: mod_base = OTHER; note = 2'-deoxy-2'-fluoroadenosine-3'-phosphate
  modified_base 7: mod_base = OTHER; note = 2'-O-methyluridine-3'-phosphate
  modified_base 8: mod_base = OTHER; note = 2'-deoxy-2'-fluoroadenosine-3'-phosphate
  modified_base 9: mod_base = OTHER; note = 2'-O-methylcytidine-3'-phosphate
  modified_base 10: mod_base = OTHER; note = 2'-deoxy-2'-fluorouridine-3'-phosphate
  modified_base 11: mod_base = OTHER; note = 2'-deoxy-2'-fluorocytidine-3'-phosphate
  modified_base 12: mod_base = OTHER; note = 2'-deoxy-2'-fluorouridine-3'-phosphate
  modified_base 13: mod_base = OTHER; note = 2'-O-methyluridine-3'-phosphate
  modified_base 14: mod_base = OTHER; note = 2'-deoxy-2'-fluoroguanosine-3'-phosphate
  modified_base 15: mod_base = OTHER; note = 2'-deoxy-2'-fluoroguanosine-3'-phosphate
  modified_base 16: mod_base = OTHER; note = 2'-O-methyluridine-3'-phosphate
  modified_base 17: mod_base = OTHER; note = 2'-O-methyluridine-3'-phosphate
  modified_base 18: mod_base = OTHER; note = 2'-deoxy-2'-fluoroadenosine-3'-phosphate
  modified_base 19: mod_base = OTHER; note = 2'-O-methylcytidine-3'-phosphate
  modified_base 20: mod_base = OTHER; note = 2'-deoxy-2'-fluoroadenosine-3'-phosphate
  modified_base 21: mod_base = OTHER; note = 2'-O-methyluridine-3'-phosphorothioate
  modified_base 22: mod_base = OTHER; note = 2'-O-methylguanosine-3'-phosphorothioate
  modified_base 23: mod_base = OTHER; note = 2'-O-methyladenosine
atggaatactcttggttacatga

SEQ ID NO: 646 - RNA, 23 nt, synthetic construct
  source 1..23: mol_type = other RNA
  modified_base 1: mod_base = OTHER; note = 2'-O-methyladenosine-3'-phosphate
  modified_base 2: mod_base = OTHER; note = 2'-deoxy-2'-fluorouridine-3'-phosphate
  modified_base 3: mod_base = OTHER; note = 2'-O-methylguanosine-3'-phosphate
  modified_base 4: mod_base = OTHER; note = 2'-deoxy-2'-fluoroguanosine-3'-phosphate
  modified_base 5: mod_base = OTHER; note = 2'-O-methyladenosine-3'-phosphate
  modified_base 6: mod_base = OTHER; note = 2'-deoxy-2'-fluoroadenosine-3'-phosphate
  modified_base 7: mod_base = OTHER; note = 2'-O-methyluridine-3'-phosphate
  modified_base 8: mod_base = OTHER; note = 2'-deoxy-2'-fluoroadenosine-3'-phosphate
  modified_base 9: mod_base = OTHER; note = 2'-O-methylcytidine-3'-phosphate
  modified_base 10: mod_base = OTHER; note = 2'-deoxy-2'-fluorouridine-3'-phosphate
  modified_base 11: mod_base = OTHER; note = 2'-deoxy-2'-fluorocytidine-3'-phosphate
  modified_base 12: mod_base = OTHER; note = 2'-deoxy-2'-fluorouridine-3'-phosphate
  modified_base 13: mod_base = OTHER; note = 2'-O-methyluridine-3'-phosphate
  modified_base 14: mod_base = OTHER; note = 2'-deoxy-2'-fluoroguanosine-3'-phosphate
  modified_base 15: mod_base = OTHER; note = 2'-deoxy-2'-fluoroguanosine-3'-phosphate
  modified_base 16: mod_base = OTHER; note = 2'-O-methyluridine-3'-phosphate
  modified_base 17: mod_base = OTHER; note = 2'-deoxy-2'-fluorouridine-3'-phosphate
  modified_base 18: mod_base = OTHER; note = 2'-O-methyladenosine-3'-phosphate
  modified_base 19: mod_base = OTHER; note = 2'-O-methylcytidine-3'-phosphate
  modified_base 20: mod_base = OTHER; note = 2'-deoxy-2'-fluoroadenosine-3'-phosphate
  modified_base 21: mod_base = OTHER; note = 2'-O-methyluridine-3'-phosphorothioate
  modified_base 22: mod_base = OTHER; note = 2'-O-methylguanosine-3'-phosphorothioate
  modified_base 23: mod_base = OTHER; note = 2'-O-methyladenosine
atggaatactcttggttacatga

SEQ ID NO: 647 - RNA, 23 nt, synthetic construct
  source 1..23: mol_type = other RNA
  modified_base 1: mod_base = OTHER; note = 2'-O-methyladenosine-3'-phosphate
  modified_base 2: mod_base = OTHER; note = 2'-deoxy-2'-fluorouridine-3'-phosphate
  modified_base 3: mod_base = OTHER; note = 2'-O-methylguanosine-3'-phosphate
  modified_base 4: mod_base = OTHER; note = 2'-deoxy-2'-fluoroguanosine-3'-phosphate
  modified_base 5: mod_base = OTHER; note = 2'-O-methyladenosine-3'-phosphate
  modified_base 6: mod_base = OTHER; note = 2'-deoxy-2'-fluoroadenosine-3'-phosphate
  modified_base 7: mod_base = OTHER; note = 2'-O-methyluridine-3'-phosphate
  modified_base 8: mod_base = OTHER; note = 2'-O-methyladenosine-3'-phosphate
  modified_base 9: mod_base = OTHER; note = 2'-deoxy-2'-fluorocytidine-3'-phosphate
  modified_base 10: mod_base = OTHER; note = 2'-O-methyluridine-3'-phosphate
  modified_base 11: mod_base = OTHER; note = 2'-deoxy-2'-fluorocytidine-3'-phosphate
  modified_base 12: mod_base = OTHER; note = 2'-O-methyluridine-3'-phosphate
  modified_base 13: mod_base = OTHER; note = 2'-deoxy-2'-fluorouridine-3'-phosphate
  modified_base 14: mod_base = OTHER; note = 2'-O-methylguanosine-3'-phosphate
  modified_base 15: mod_base = OTHER; note = 2'-deoxy-2'-fluoroguanosine-3'-phosphate
  modified_base 16: mod_base = OTHER; note = 2'-O-methyluridine-3'-phosphate
  modified_base 17: mod_base = OTHER; note = 2'-O-methyluridine-3'-phosphate
  modified_base 18: mod_base = OTHER; note = 2'-deoxy-2'-fluoroadenosine-3'-phosphate
  modified_base 19: mod_base = OTHER; note = 2'-O-methylcytidine-3'-phosphate
  modified_base 20: mod_base = OTHER; note = 2'-deoxy-2'-fluoroadenosine-3'-phosphate
  modified_base 21: mod_base = OTHER; note = 2'-O-methyluridine-3'-phosphorothioate
  modified_base 22: mod_base = OTHER; note = 2'-O-methylguanosine-3'-phosphorothioate
  modified_base 23: mod_base = OTHER; note = 2'-O-methyladenosine
atggaatactcttggttacatga

SEQ ID NO: 648 - RNA, 23 nt, synthetic construct
  source 1..23: mol_type = other RNA
  modified_base 1: mod_base = OTHER; note = 2'-O-methyladenosine-3'-phosphate
  modified_base 2: mod_base = OTHER; note = 2'-deoxy-2'-fluorouridine-3'-phosphate
  modified_base 3: mod_base = OTHER; note = 2'-O-methylguanosine-3'-phosphate
  modified_base 4: mod_base = OTHER; note = 2'-deoxy-2'-fluoroguanosine-3'-phosphate
  modified_base 5: mod_base = OTHER; note = 2'-O-methyladenosine-3'-phosphate
  modified_base 6: mod_base = OTHER; note = 2'-O-methyladenosine-3'-phosphate
  modified_base 7: mod_base = OTHER; note = 2'-deoxy-2'-fluorouridine-3'-phosphate
  modified_base 8: mod_base = OTHER; note = 2'-O-methyladenosine-3'-phosphate
  modified_base 9: mod_base = OTHER; note = 2'-deoxy-2'-fluorocytidine-3'-phosphate
  modified_base 10: mod_base = OTHER; note = 2'-deoxy-2'-fluorouridine-3'-phosphate
  modified_base 11: mod_base = OTHER; note = 2'-O-methylcytidine-3'-phosphate
  modified_base 12: mod_base = OTHER; note = 2'-deoxy-2'-fluorouridine-3'-phosphate
  modified_base 13: mod_base = OTHER; note = 2'-O-methyluridine-3'-phosphate
  modified_base 14: mod_base = OTHER; note = 2'-deoxy-2'-fluoroguanosine-3'-phosphate
  modified_base 15: mod_base = OTHER; note = 2'-deoxy-2'-fluoroguanosine-3'-phosphate
  modified_base 16: mod_base = OTHER; note = 2'-O-methyluridine-3'-phosphate
  modified_base 17: mod_base = OTHER; note = 2'-O-methyluridine-3'-phosphate
  modified_base 18: mod_base = OTHER; note = 2'-deoxy-2'-fluoroadenosine-3'-phosphate
  modified_base 19: mod_base = OTHER; note = 2'-O-methylcytidine-3'-phosphate
  modified_base 20: mod_base = OTHER; note = 2'-deoxy-2'-fluoroadenosine-3'-phosphate
  modified_base 21: mod_base = OTHER; note = 2'-deoxy-2'-fluoroadenosine-3'-phosphorothioate
  modified_base 22: mod_base = OTHER; note = 2'-O-methylguanosine-3'-phosphorothioate
  modified_base 23: mod_base = OTHER; note = 2'-O-methyladenosine
atggaatactcttggttacaaga

SEQ ID NO: 649 - DNA, 23 bp, synthetic construct
  source 1..23: mol_type = other DNA
  modified_base 1: mod_base = OTHER; note = 2'-O-methyladenosine-3'-phosphate
  modified_base 2: mod_base = OTHER; note = 2'-deoxy-2'-fluorouridine-3'-phosphate
  modified_base 3: mod_base = OTHER; note = 2'-O-methylguanosine-3'-phosphate
  modified_base 4: mod_base = OTHER; note = 2'-deoxy-2'-fluoroguanosine-3'-phosphate
  modified_base 5: mod_base = OTHER; note = 2'-O-methyladenosine-3'-phosphate
  modified_base 6: mod_base = OTHER; note = 2'-deoxy-2'-fluoroadenosine-3'-phosphate
  modified_base 7: mod_base = OTHER; note = 2'-O-methyluridine-3'-phosphate
  modified_base 8: mod_base = OTHER; note = 2'-O-methyladenosine-3'-phosphate
  modified_base 10: mod_base = OTHER; note = 2'-O-methyluridine-3'-phosphate
  modified_base 12: mod_base = OTHER; note = 2'-O-methyluridine-3'-phosphate
  modified_base 14: mod_base = OTHER; note = 2'-O-methylguanosine-3'-phosphate
  modified_base 16: mod_base = OTHER; note = 2'-O-methyluridine-3'-phosphate
  modified_base 17: mod_base = OTHER; note = 2'-O-methyluridine-3'-phosphate
  modified_base 18: mod_base = OTHER; note = 2'-deoxy-2'-fluoroadenosine-3'-phosphate
  modified_base 19: mod_base = OTHER; note = 2'-O-methylcytidine-3'-phosphate
  modified_base 20: mod_base = OTHER; note = 2'-deoxy-2'-fluoroadenosine-3'-phosphate
  modified_base 21: mod_base = OTHER; note = 2'-O-methyluridine-3'-phosphorothioate
  modified_base 22: mod_base = OTHER; note = 2'-O-methylguanosine-3'-phosphorothioate
  modified_base 23: mod_base = OTHER; note = 2'-O-methyladenosine
  misc_feature 1..8: note = RNA
  misc_feature 10: note = RNA
  misc_feature 12: note = RNA
  misc_feature 14: note = RNA
  misc_feature 16..23: note = RNA
  misc_feature 9: note = DNA
  misc_feature 11: note = DNA
  misc_feature 13: note = DNA
  misc_feature 15: note = DNA
atggaatactcttggttacatga

SEQ ID NO: 650 - RNA, 23 nt, synthetic construct
  source 1..23: mol_type = other RNA
  modified_base 1: mod_base = OTHER; note = 2'-O-methyladenosine-3'-phosphate
  modified_base 2: mod_base = OTHER; note = 2'-deoxy-2'-fluorouridine-3'-phosphate
  modified_base 3: mod_base = OTHER; note = 2'-deoxy-2'-fluoroguanosine-3'-phosphate
  modified_base 4: mod_base = OTHER; note = 2'-O-methylguanosine-3'-phosphate
  modified_base 5: mod_base = OTHER; note = 2'-deoxy-2'-fluoroadenosine-3'-phosphate
  modified_base 6: mod_base = OTHER; note = 2'-deoxy-2'-fluoroadenosine-3'-phosphate
  modified_base 7: mod_base = OTHER; note = 2'-O-methyluridine-3'-phosphate
  modified_base 8: mod_base = OTHER; note = 2'-deoxy-2'-fluoroadenosine-3'-phosphate
  modified_base 9: mod_base = OTHER; note = 2'-deoxy-2'-fluorocytidine-3'-phosphate
  modified_base 10: mod_base = OTHER; note = 2'-O-methyluridine-3'-phosphate
  modified_base 11: mod_base = OTHER; note = 2'-deoxy-2'-fluorocytidine-3'-phosphate
  modified_base 12: mod_base = OTHER; note = 2'-deoxy-2'-fluorouridine-3'-phosphate
  modified_base 13: mod_base = OTHER; note = 2'-O-methyluridine-3'-phosphate
  modified_base 14: mod_base = OTHER; note = 2'-deoxy-2'-fluoroguanosine-3'-phosphate
  modified_base 15: mod_base = OTHER; note = 2'-deoxy-2'-fluoroguanosine-3'-phosphate
  modified_base 16: mod_base = OTHER; note = 2'-O-methyluridine-3'-phosphate
  modified_base 17: mod_base = OTHER; note = 2'-deoxy-2'-fluorouridine-3'-phosphate
  modified_base 18: mod_base = OTHER; note = 2'-deoxy-2'-fluoroadenosine-3'-phosphate
  modified_base 19: mod_base = OTHER; note = 2'-O-methylcytidine-3'-phosphate
  modified_base 20: mod_base = OTHER; note = 2'-deoxy-2'-fluoroadenosine-3'-phosphate
  modified_base 21: mod_base = OTHER; note = 2'-deoxy-2'-fluorouridine-3'-phosphorothioate
  modified_base 22: mod_base = OTHER; note = 2'-deoxy-2'-fluoroguanosine-3'-phosphorothioate
  modified_base 23: mod_base = OTHER; note = 2'-O-methyladenosine
atggaatactcttggttacatga

SEQ ID NO: 651 - DNA, 23 bp, synthetic construct
  source 1..23: mol_type = other DNA
  modified_base 1: mod_base = OTHER; note = 2'-O-methyladenosine-3'-phosphate
  modified_base 2: mod_base = OTHER; note = 2'-deoxy-2'-fluorouridine-3'-phosphate
  modified_base 3: mod_base = OTHER; note = 2'-O-methylguanosine-3'-phosphate
  modified_base 4: mod_base = OTHER; note = 2'-deoxy-2'-fluoroguanosine-3'-phosphate
  modified_base 5: mod_base = OTHER; note = 2'-O-methyladenosine-3'-phosphate
  modified_base 6: mod_base = OTHER; note = 2'-deoxy-2'-fluoroadenosine-3'-phosphate
  modified_base 7: mod_base = OTHER; note = 2'-O-methyluridine-3'-phosphate
  modified_base 8: mod_base = OTHER; note = 2'-O-methyladenosine-3'-phosphate
  modified_base 10: mod_base = OTHER; note = 2'-deoxy-2'-fluorouridine-3'-phosphate
  modified_base 11: mod_base = OTHER; note = 2'-O-methylcytidine-3'-phosphate
  modified_base 13: mod_base = OTHER; note = 2'-deoxy-2'-fluorouridine-3'-phosphate
  modified_base 14: mod_base = OTHER; note = 2'-O-methylguanosine-3'-phosphate
  modified_base 16: mod_base = OTHER; note = 2'-O-methyluridine-3'-phosphate
  modified_base 17: mod_base = OTHER; note = 2'-O-methyluridine-3'-phosphate
  modified_base 18: mod_base = OTHER; note = 2'-deoxy-2'-fluoroadenosine-3'-phosphate
  modified_base 19: mod_base = OTHER; note = 2'-O-methylcytidine-3'-phosphate
  modified_base 20: mod_base = OTHER; note = 2'-deoxy-2'-fluoroadenosine-3'-phosphate
  modified_base 21: mod_base = OTHER; note = 2'-O-methyluridine-3'-phosphorothioate
  modified_base 22: mod_base = OTHER; note = 2'-O-methylguanosine-3'-phosphorothioate
  modified_base 23: mod_base = OTHER; note = 2'-O-methyladenosine
  misc_feature 1..8: note = RNA
  misc_feature 10..11: note = RNA
  misc_feature 13..14: note = RNA
  misc_feature 16..23: note = RNA
  misc_feature 9: note = DNA
  misc_feature 12: note = DNA
  misc_feature 15: note = DNA
atggaatactcttggttacatga

SEQ ID NO: 652 - RNA, 23 nt, synthetic construct
  source 1..23: mol_type = other RNA
  modified_base 1: mod_base = OTHER; note = 2'-O-methyladenosine-3'-phosphate
  modified_base 2: mod_base = OTHER; note = 2'-deoxy-2'-fluorouridine-3'-phosphate
  modified_base 3: mod_base = OTHER; note = 2'-O-methylguanosine-3'-phosphate
  modified_base 4: mod_base = OTHER; note = 2'-deoxy-2'-fluoroguanosine-3'-phosphate
  modified_base 5: mod_base = OTHER; note = 2'-deoxy-2'-fluoroadenosine-3'-phosphate
  modified_base 6: mod_base = OTHER; note = 2'-O-methyladenosine-3'-phosphate
  modified_base 7: mod_base = OTHER; note = 2'-deoxy-2'-fluorouridine-3'-phosphate
  modified_base 8: mod_base = OTHER; note = 2'-deoxy-2'-fluoroadenosine-3'-phosphate
  modified_base 9: mod_base = OTHER; note = 2'-deoxy-2'-fluorocytidine-3'-phosphate
  modified_base 10: mod_base = OTHER; note = 2'-O-methyluridine-3'-phosphate
  modified_base 11: mod_base = OTHER; note = 2'-deoxy-2'-fluorocytidine-3'-phosphate
  modified_base 12: mod_base = OTHER; note = 2'-deoxy-2'-fluorouridine-3'-phosphate
  modified_base 13: mod_base = OTHER; note = 2'-deoxy-2'-fluorouridine-3'-phosphate
  modified_base 14: mod_base = OTHER; note = 2'-O-methylguanosine-3'-phosphate
  modified_base 15: mod_base = OTHER; note = 2'-deoxy-2'-fluoroguanosine-3'-phosphate
  modified_base 16: mod_base = OTHER; note = 2'-deoxy-2'-fluorouridine-3'-phosphate
  modified_base 17: mod_base = OTHER; note = 2'-deoxy-2'-fluorouridine-3'-phosphate
  modified_base 18: mod_base = OTHER; note = 2'-O-methyladenosine-3'-phosphate
  modified_base 19: mod_base = OTHER; note = 2'-deoxy-2'-fluorocytidine-3'-phosphate
  modified_base 20: mod_base = OTHER; note = 2'-deoxy-2'-fluoroadenosine-3'-phosphate
  modified_base 21: mod_base = OTHER; note = 2'-deoxy-2'-fluorouridine-3'-phosphorothioate
  modified_base 22: mod_base = OTHER; note = 2'-deoxy-2'-fluoroguanosine-3'-phosphorothioate
  modified_base 23: mod_base = OTHER; note = 2'-O-methyladenosine
atggaatactcttggttacatga

SEQ ID NO: 653 - RNA, 23 nt, synthetic construct
  source 1..23: mol_type = other RNA
  modified_base 1: mod_base = OTHER; note = 2'-O-methyladenosine-3'-phosphate
  modified_base 2: mod_base = OTHER; note = 2'-deoxy-2'-fluorouridine-3'-phosphate
  modified_base 3: mod_base = OTHER; note = 2'-O-methylguanosine-3'-phosphate
  modified_base 4: mod_base = OTHER; note = 2'-deoxy-2'-fluoroguanosine-3'-phosphate
  modified_base 5: mod_base = OTHER; note = 2'-O-methyladenosine-3'-phosphate
  modified_base 6: mod_base = OTHER; note = 2'-deoxy-2'-fluoroadenosine-3'-phosphate
  modified_base 7: mod_base = OTHER; note = 2'-O-methyluridine-3'-phosphate
  modified_base 8: mod_base = OTHER; note = 2'-deoxy-2'-fluoroadenosine-3'-phosphate
  modified_base 9: mod_base = OTHER; note = 2'-O-methylcytidine-3'-phosphate
  modified_base 10: mod_base = OTHER; note = 2'-deoxy-2'-fluorouridine-3'-phosphate
  modified_base 11: mod_base = OTHER; note = 2'-O-methylcytidine-3'-phosphate
  modified_base 12: mod_base = OTHER; note = 2'-deoxy-2'-fluorouridine-3'-phosphate
  modified_base 13: mod_base = OTHER; note = 2'-O-methyluridine-3'-phosphate
  modified_base 14: mod_base = OTHER; note = 2'-deoxy-2'-fluoroguanosine-3'-phosphate
  modified_base 15: mod_base = OTHER; note = 2'-O-methylguanosine-3'-phosphate
  modified_base 16: mod_base = OTHER; note = 2'-deoxy-2'-fluorouridine-3'-phosphate
  modified_base 17: mod_base = OTHER; note = 2'-O-methyluridine-3'-phosphate
  modified_base 18: mod_base = OTHER; note = 2'-deoxy-2'-fluoroadenosine-3'-phosphate
  modified_base 19: mod_base = OTHER; note = 2'-O-methylcytidine-3'-phosphate
  modified_base 20: mod_base = OTHER; note = 2'-deoxy-2'-fluoroadenosine-3'-phosphate
  modified_base 21: mod_base = OTHER; note = 2'-O-methyluridine-3'-phosphorothioate
  modified_base 22: mod_base = OTHER; note = 2'-deoxy-2'-fluoroguanosine-3'-phosphorothioate
  modified_base 23: mod_base = OTHER; note = 2'-O-methyladenosine
atggaatactcttggttacatga

SEQ ID NO: 654 - RNA, 23 nt, synthetic construct
  source 1..23: mol_type = other RNA
  modified_base 1: mod_base = OTHER; note = 2'-O-methyladenosine-3'-phosphate
  modified_base 2: mod_base = OTHER; note = 2'-deoxy-2'-fluorouridine-3'-phosphate
  modified_base 3: mod_base = OTHER; note = 2'-O-methylguanosine-3'-phosphate
  modified_base 4: mod_base = OTHER; note = 2'-deoxy-2'-fluoroguanosine-3'-phosphate
  modified_base 5: mod_base = OTHER; note = 2'-O-methyladenosine-3'-phosphate
  modified_base 6: mod_base = OTHER; note = 2'-deoxy-2'-fluoroadenosine-3'-phosphate
  modified_base 7: mod_base = OTHER; note = 2'-O-methyluridine-3'-phosphate
  modified_base 8: mod_base = OTHER; note = 2'-deoxy-2'-fluoroadenosine-3'-phosphate
  modified_base 9: mod_base = OTHER; note = 2'-O-methylcytidine-3'-phosphate
  modified_base 10: mod_base = OTHER; note = 2'-deoxy-2'-fluorouridine-3'-phosphate
  modified_base 11: mod_base = OTHER; note = 2'-O-methylcytidine-3'-phosphate
  modified_base 12: mod_base = OTHER; note = 2'-deoxy-2'-fluorouridine-3'-phosphate
  modified_base 13: mod_base = OTHER; note = 2'-O-methyluridine-3'-phosphate
  modified_base 14: mod_base = OTHER; note = 2'-deoxy-2'-fluoroguanosine-3'-phosphate
  modified_base 15: mod_base = OTHER; note = 2'-O-methylguanosine-3'-phosphate
  modified_base 16: mod_base = OTHER; note = 2'-deoxy-2'-fluorouridine-3'-phosphate
  modified_base 17: mod_base = OTHER; note = 2'-O-methyluridine-3'-phosphate
  modified_base 18: mod_base = OTHER; note = 2'-deoxy-2'-fluoroadenosine-3'-phosphate
  modified_base 19: mod_base = OTHER; note = 2'-O-methylcytidine-3'-phosphate
  modified_base 20: mod_base = OTHER; note = 2'-deoxy-2'-fluoroadenosine-3'-phosphate
  modified_base 21: mod_base = OTHER; note = 2'-O-methyluridine-3'-phosphorothioate
  modified_base 22: mod_base = OTHER; note = 2'-deoxy-2'-fluoroguanosine-3'-phosphorothioate
  modified_base 23: mod_base = OTHER; note = 2'-O-methyladenosine
atggaatactcttggttacatga

SEQ ID NO: 655 - RNA, 23 nt, synthetic construct
  source 1..23: mol_type = other RNA
  modified_base 1: mod_base = OTHER; note = 2'-O-methyladenosine-3'-phosphate
  modified_base 2: mod_base = OTHER; note = 2'-deoxy-2'-fluorouridine-3'-phosphate
  modified_base 3: mod_base = OTHER; note = 2'-O-methylguanosine-3'-phosphate
  modified_base 4: mod_base = OTHER; note = 2'-deoxy-2'-fluoroguanosine-3'-phosphate
  modified_base 5: mod_base = OTHER; note = 2'-O-methyladenosine-3'-phosphate
  modified_base 6: mod_base = OTHER; note = 2'-deoxy-2'-fluoroadenosine-3'-phosphate
  modified_base 7: mod_base = OTHER; note = 2'-O-methyluridine-3'-phosphate
  modified_base 8: mod_base = OTHER; note = 2'-deoxy-2'-fluoroadenosine-3'-phosphate
  modified_base 9: mod_base = OTHER; note = 2'-O-methylcytidine-3'-phosphate
  modified_base 10: mod_base = OTHER; note = 2'-deoxy-2'-fluorouridine-3'-phosphate
  modified_base 11: mod_base = OTHER; note = 2'-O-methylcytidine-3'-phosphate
  modified_base 12: mod_base = OTHER; note = 2'-deoxy-2'-fluorouridine-3'-phosphate
  modified_base 13: mod_base = OTHER; note = 2'-O-methyluridine-3'-phosphate
  modified_base 14: mod_base = OTHER; note = 2'-deoxy-2'-fluoroguanosine-3'-phosphate
  modified_base 15: mod_base = OTHER; note = 2'-O-methylguanosine-3'-phosphate
  modified_base 16: mod_base = OTHER; note = 2'-deoxy-2'-fluorouridine-3'-phosphate
  modified_base 17: mod_base = OTHER; note = 2'-O-methyluridine-3'-phosphate
  modified_base 18: mod_base = OTHER; note = 2'-deoxy-2'-fluoroadenosine-3'-phosphate
  modified_base 19: mod_base = OTHER; note = 2'-O-methylcytidine-3'-phosphate
  modified_base 20: mod_base = OTHER; note = 2'-deoxy-2'-fluoroadenosine-3'-phosphate
  modified_base 21: mod_base = OTHER; note = 2'-O-methyluridine-3'-phosphorothioate
  modified_base 22: mod_base = OTHER; note = 2'-deoxy-2'-fluoroguanosine-3'-phosphorothioate
  modified_base 23: mod_base = OTHER; note = 2'-O-methyladenosine
atggaatactcttggttacatga

SEQ ID NO: 656 - RNA, 23 nt, synthetic construct
  source 1..23: mol_type = other RNA
  modified_base 1: mod_base = OTHER; note = 2'-deoxy-2'-fluoroadenosine-3'-phosphate
  modified_base 2: mod_base = OTHER; note = 2'-deoxy-2'-fluorouridine-3'-phosphate
  modified_base 3: mod_base = OTHER; note = 2'-O-methylguanosine-3'-phosphate
  modified_base 4: mod_base = OTHER; note = 2'-deoxy-2'-fluoroguanosine-3'-phosphate
  modified_base 5: mod_base = OTHER; note = 2'-O-methyladenosine-3'-phosphate
  modified_base 6: mod_base = OTHER; note = 2'-deoxy-2'-fluoroadenosine-3'-phosphate
  modified_base 7: mod_base = OTHER; note = 2'-O-methyluridine-3'-phosphate
  modified_base 8: mod_base = OTHER; note = 2'-deoxy-2'-fluoroadenosine-3'-phosphate
  modified_base 9: mod_base = OTHER; note = 2'-O-methylcytidine-3'-phosphate
  modified_base 10: mod_base = OTHER; note = 2'-deoxy-2'-fluorouridine-3'-phosphate
  modified_base 11: mod_base = OTHER; note = 2'-O-methylcytidine-3'-phosphate
  modified_base 12: mod_base = OTHER; note = 2'-deoxy-2'-fluorouridine-3'-phosphate
  modified_base 13: mod_base = OTHER; note = 2'-O-methyluridine-3'-phosphate
  modified_base 14: mod_base = OTHER; note = 2'-deoxy-2'-fluoroguanosine-3'-phosphate
  modified_base 15: mod_base = OTHER; note = 2'-O-methylguanosine-3'-phosphate
  modified_base 16: mod_base = OTHER; note = 2'-O-methyluridine-3'-phosphate
  modified_base 17: mod_base = OTHER; note = 2'-O-methyluridine-3'-phosphate
  modified_base 18: mod_base = OTHER; note = 2'-deoxy-2'-fluoroadenosine-3'-phosphate
  modified_base 19: mod_base = OTHER; note = 2'-O-methylcytidine-3'-phosphate
  modified_base 20: mod_base = OTHER; note = 2'-deoxy-2'-fluoroadenosine-3'-phosphate
  modified_base 21: mod_base = OTHER; note = 2'-deoxy-2'-fluorouridine-3'-phosphorothioate
  modified_base 22: mod_base = OTHER; note = 2'-deoxy-2'-fluoroguanosine-3'-phosphorothioate
  modified_base 23: mod_base = OTHER; note = 2'-O-methyladenosine
atggaatactcttggttacatga

SEQ ID NO: 657 - RNA, 23 nt, synthetic construct
  source 1..23: mol_type = other RNA
  modified_base 1: mod_base = OTHER; note = 2'-deoxy-2'-fluoroadenosine-3'-phosphate
  modified_base 2: mod_base = OTHER; note = 2'-deoxy-2'-fluorouridine-3'-phosphate
  modified_base 3: mod_base = OTHER; note = 2'-O-methylguanosine-3'-phosphate
  modified_base 4: mod_base = OTHER; note = 2'-deoxy-2'-fluoroguanosine-3'-phosphate
  modified_base 5: mod_base = OTHER; note = 2'-O-methyladenosine-3'-phosphate
  modified_base 6: mod_base = OTHER; note = 2'-deoxy-2'-fluoroadenosine-3'-phosphate
  modified_base 7: mod_base = OTHER; note = 2'-O-methyluridine-3'-phosphate
  modified_base 8: mod_base = OTHER; note = 2'-deoxy-2'-fluoroadenosine-3'-phosphate
  modified_base 9: mod_base = OTHER; note = 2'-O-methylcytidine-3'-phosphate
  modified_base 10: mod_base = OTHER; note = 2'-deoxy-2'-fluorouridine-3'-phosphate
  modified_base 11: mod_base = OTHER; note = 2'-O-methylcytidine-3'-phosphate
  modified_base 12: mod_base = OTHER; note = 2'-deoxy-2'-fluorouridine-3'-phosphate
  modified_base 13: mod_base = OTHER; note = 2'-O-methyluridine-3'-phosphate
  modified_base 14: mod_base = OTHER; note = 2'-O-methylguanosine-3'-phosphate
  modified_base 15: mod_base = OTHER; note = 2'-O-methylguanosine-3'-phosphate
  modified_base 16: mod_base = OTHER; note = 2'-deoxy-2'-fluorouridine-3'-phosphate
  modified_base 17: mod_base = OTHER; note = 2'-O-methyluridine-3'-phosphate
  modified_base 18: mod_base = OTHER; note = 2'-deoxy-2'-fluoroadenosine-3'-phosphate
  modified_base 19: mod_base = OTHER; note = 2'-O-methylcytidine-3'-phosphate
  modified_base 20: mod_base = OTHER; note = 2'-deoxy-2'-fluoroadenosine-3'-phosphate
  modified_base 21: mod_base = OTHER; note = 2'-O-methyluridine-3'-phosphorothioate
  modified_base 22: mod_base = OTHER; note = 2'-deoxy-2'-fluoroguanosine-3'-phosphorothioate
  modified_base 23: mod_base = OTHER; note = 2'-O-methyladenosine
atggaatactcttggttacatga

SEQ ID NO: 658 - RNA, 23 nt, synthetic construct
  source 1..23: mol_type = other RNA
  modified_base 1: mod_base = OTHER; note = 2'-deoxy-2'-fluoroadenosine-3'-phosphate
  modified_base 2: mod_base = OTHER; note = 2'-deoxy-2'-fluorouridine-3'-phosphate
  modified_base 3: mod_base = OTHER; note = 2'-O-methylguanosine-3'-phosphate
  modified_base 4: mod_base = OTHER; note = 2'-O-methylguanosine-3'-phosphate
  modified_base 5: mod_base = OTHER; note = 2'-O-methyladenosine-3'-phosphate
  modified_base 6: mod_base = OTHER; note = 2'-deoxy-2'-fluoroadenosine-3'-phosphate
  modified_base 7: mod_base = OTHER; note = 2'-O-methyluridine-3'-phosphate
  modified_base 8: mod_base = OTHER; note = 2'-deoxy-2'-fluoroadenosine-3'-phosphate
  modified_base 9: mod_base = OTHER; note = 2'-O-methylcytidine-3'-phosphate
  modified_base 10: mod_base = OTHER; note = 2'-deoxy-2'-fluorouridine-3'-phosphate
  modified_base 11: mod_base = OTHER; note = 2'-O-methylcytidine-3'-phosphate
  modified_base 12: mod_base = OTHER; note = 2'-deoxy-2'-fluorouridine-3'-phosphate
  modified_base 13: mod_base = OTHER; note = 2'-O-methyluridine-3'-phosphate
  modified_base 14: mod_base = OTHER; note = 2'-deoxy-2'-fluoroguanosine-3'-phosphate
  modified_base 15: mod_base = OTHER; note = 2'-O-methylguanosine-3'-phosphate
  modified_base 16: mod_base = OTHER; note = 2'-deoxy-2'-fluorouridine-3'-phosphate
  modified_base 17: mod_base = OTHER; note = 2'-O-methyluridine-3'-phosphate
  modified_base 18: mod_base = OTHER; note = 2'-deoxy-2'-fluoroadenosine-3'-phosphate
  modified_base 19: mod_base = OTHER; note = 2'-O-methylcytidine-3'-phosphate
  modified_base 20: mod_base = OTHER; note = 2'-deoxy-2'-fluoroadenosine-3'-phosphate
  modified_base 21: mod_base = OTHER; note = 2'-O-methyluridine-3'-phosphorothioate
  modified_base 22: mod_base = OTHER; note = 2'-deoxy-2'-fluoroguanosine-3'-phosphorothioate
  modified_base 23: mod_base = OTHER; note = 2'-O-methyladenosine
atggaatactcttggttacatga

SEQ ID NO: 659 - RNA, 23 nt, synthetic construct
  source 1..23: mol_type = other RNA
  modified_base 1: mod_base = OTHER; note = 2'-deoxy-2'-fluoroadenosine-3'-phosphate
  modified_base 2: mod_base = OTHER; note = 2'-O-methyluridine-3'-phosphate
  modified_base 3: mod_base = OTHER; note = 2'-deoxy-2'-fluoroguanosine-3'-phosphate
  modified_base 4: mod_base = OTHER; note = 2'-O-methylguanosine-3'-phosphate
  modified_base 5: mod_base = OTHER; note = 2'-deoxy-2'-fluoroadenosine-3'-phosphate
  modified_base 6: mod_base = OTHER; note = 2'-O-methyladenosine-3'-phosphate
  modified_base 7: mod_base = OTHER; note = 2'-deoxy-2'-fluorouridine-3'-phosphate
  modified_base 8: mod_base = OTHER; note = 2'-O-methyladenosine-3'-phosphate
  modified_base 9: mod_base = OTHER; note = 2'-deoxy-2'-fluorocytidine-3'-phosphate
  modified_base 10: mod_base = OTHER; note = 2'-O-methyluridine-3'-phosphate
  modified_base 11: mod_base = OTHER; note = 2'-deoxy-2'-fluorocytidine-3'-phosphate
  modified_base 12: mod_base = OTHER; note = 2'-O-methyluridine-3'-phosphate
  modified_base 13: mod_base = OTHER; note = 2'-deoxy-2'-fluorouridine-3'-phosphate
  modified_base 14: mod_base = OTHER; note = 2'-O-methylguanosine-3'-phosphate
  modified_base 15: mod_base = OTHER; note = 2'-deoxy-2'-fluoroguanosine-3'-phosphate
  modified_base 16: mod_base = OTHER; note = 2'-O-methyluridine-3'-phosphate
  modified_base 17: mod_base = OTHER; note = 2'-deoxy-2'-fluorouridine-3'-phosphate
  modified_base 18: mod_base = OTHER; note = 2'-O-methyladenosine-3'-phosphate
  modified_base 19: mod_base = OTHER; note = 2'-deoxy-2'-fluorocytidine-3'-phosphate
  modified_base 20: mod_base = OTHER; note = 2'-O-methyladenosine-3'-phosphate
  modified_base 21: mod_base = OTHER; note = 2'-deoxy-2'-fluorouridine-3'-phosphorothioate
  modified_base 22: mod_base = OTHER; note = 2'-O-methylguanosine-3'-phosphorothioate
  modified_base 23: mod_base = OTHER; note = 2'-deoxy-2'-fluoroadenosine
atggaatactcttggttacatga

SEQ ID NO: 660 - RNA, 23 nt, synthetic construct
  source 1..23: mol_type = other RNA
  modified_base 1: mod_base = OTHER; note = 2'-deoxy-2'-fluoroadenosine-3'-phosphate
  modified_base 2: mod_base = OTHER; note = 2'-O-methyluridine-3'-phosphate
  modified_base 3: mod_base = OTHER; note = 2'-deoxy-2'-fluoroguanosine-3'-phosphate
  modified_base 4: mod_base = OTHER; note = 2'-O-methylguanosine-3'-phosphate
  modified_base 5: mod_base = OTHER; note = 2'-deoxy-2'-fluoroadenosine-3'-phosphate
  modified_base 6: mod_base = OTHER; note = 2'-O-methyladenosine-3'-phosphate
  modified_base 7: mod_base = OTHER; note = 2'-deoxy-2'-fluorouridine-3'-phosphate
  modified_base 8: mod_base = OTHER; note = 2'-O-methyladenosine-3'-phosphate
  modified_base 9: mod_base = OTHER; note = 2'-deoxy-2'-fluorocytidine-3'-phosphate
  modified_base 10: mod_base = OTHER; note = 2'-O-methyluridine-3'-phosphate
  modified_base 11: mod_base = OTHER; note = 2'-deoxy-2'-fluorocytidine-3'-phosphate
  modified_base 12: mod_base = OTHER; note = 2'-O-methyluridine-3'-phosphate
  modified_base 13: mod_base = OTHER; note = 2'-deoxy-2'-fluorouridine-3'-phosphate
  modified_base 14: mod_base = OTHER; note = 2'-O-methylguanosine-3'-phosphate
  modified_base 15: mod_base = OTHER; note = 2'-deoxy-2'-fluoroguanosine-3'-phosphate
  modified_base 16: mod_base = OTHER; note = 2'-O-methyluridine-3'-phosphate
  modified_base 17: mod_base = OTHER; note = 2'-deoxy-2'-fluorouridine-3'-phosphate
  modified_base 18: mod_base = OTHER; note = 2'-O-methyladenosine-3'-phosphate
  modified_base 19: mod_base = OTHER; note = 2'-deoxy-2'-fluorocytidine-3'-phosphate
  modified_base 20: mod_base = OTHER; note = 2'-O-methyladenosine-3'-phosphate
  modified_base 21: mod_base = OTHER; note = 2'-deoxy-2'-fluorouridine-3'-phosphorothioate
  modified_base 22: mod_base = OTHER; note = 2'-O-methylguanosine-3'-phosphorothioate
  modified_base 23: mod_base = OTHER; note = 2'-deoxy-2'-fluoroadenosine
atggaatactcttggttacatga

SEQ ID NO: 661 - RNA, 23 nt, synthetic construct
  source 1..23: mol_type = other RNA
  modified_base 1: mod_base = OTHER; note = 2'-deoxy-2'-fluoroadenosine-3'-phosphate
  modified_base 2: mod_base = OTHER; note = 2'-O-methyluridine-3'-phosphate
  modified_base 3: mod_base = OTHER; note = 2'-deoxy-2'-fluoroguanosine-3'-phosphate
  modified_base 4: mod_base = OTHER; note = 2'-O-methylguanosine-3'-phosphate
  modified_base 5: mod_base = OTHER; note = 2'-deoxy-2'-fluoroadenosine-3'-phosphate
  modified_base 6: mod_base = OTHER; note = 2'-O-methyladenosine-3'-phosphate
  modified_base 7: mod_base = OTHER; note = 2'-deoxy-2'-fluorouridine-3'-phosphate
  modified_base 8: mod_base = OTHER; note = 2'-O-methyladenosine-3'-phosphate
  modified_base 9: mod_base = OTHER; note = 2'-deoxy-2'-fluorocytidine-3'-phosphate
  modified_base 10: mod_base = OTHER; note = 2'-O-methyluridine-3'-phosphate
  modified_base 11: mod_base = OTHER; note = 2'-deoxy-2'-fluorocytidine-3'-phosphate
  modified_base 12: mod_base = OTHER; note = 2'-O-methyluridine-3'-phosphate
  modified_base 13: mod_base = OTHER; note = 2'-deoxy-2'-fluorouridine-3'-phosphate
  modified_base 14: mod_base = OTHER; note = 2'-O-methylguanosine-3'-phosphate
  modified_base 15: mod_base = OTHER; note = 2'-deoxy-2'-fluoroguanosine-3'-phosphate
  modified_base 16: mod_base = OTHER; note = 2'-O-methyluridine-3'-phosphate
  modified_base 17: mod_base = OTHER; note = 2'-deoxy-2'-fluorouridine-3'-phosphate
  modified_base 18: mod_base = OTHER; note = 2'-O-methyladenosine-3'-phosphate
  modified_base 19: mod_base = OTHER; note = 2'-deoxy-2'-fluorocytidine-3'-phosphate
  modified_base 20: mod_base = OTHER; note = 2'-O-methyladenosine-3'-phosphate
  modified_base 21: mod_base = OTHER; note = 2'-deoxy-2'-fluorouridine-3'-phosphorothioate
  modified_base 22: mod_base = OTHER; note = 2'-O-methylguanosine-3'-phosphorothioate
  modified_base 23: mod_base = OTHER; note = 2'-deoxy-2'-fluoroadenosine
atggaatactcttggttacatga

SEQ ID NO: 662 - RNA, 23 nt, synthetic construct
  source 1..23: mol_type = other RNA
  modified_base 1: mod_base = OTHER; note = 2'-deoxy-2'-fluoroadenosine-3'-phosphate
  modified_base 2: mod_base = OTHER; note = 2'-deoxy-2'-fluorouridine-3'-phosphate
  modified_base 3: mod_base = OTHER; note = 2'-deoxy-2'-fluoroguanosine-3'-phosphate
  modified_base 4: mod_base = OTHER; note = 2'-O-methylguanosine-3'-phosphate
  modified_base 5: mod_base = OTHER; note = 2'-deoxy-2'-fluoroadenosine-3'-phosphate
  modified_base 6: mod_base = OTHER; note = 2'-O-methyladenosine-3'-phosphate
  modified_base 7: mod_base = OTHER; note = 2'-deoxy-2'-fluorouridine-3'-phosphate
  modified_base 8: mod_base = OTHER; note = 2'-deoxy-2'-fluoroadenosine-3'-phosphate
  modified_base 9: mod_base = OTHER; note = 2'-deoxy-2'-fluorocytidine-3'-phosphate
  modified_base 10: mod_base = OTHER; note = 2'-O-methyluridine-3'-phosphate
  modified_base 11: mod_base = OTHER; note = 2'-deoxy-2'-fluorocytidine-3'-phosphate
  modified_base 12: mod_base = OTHER; note = 2'-O-methyluridine-3'-phosphate
  modified_base 13: mod_base = OTHER; note = 2'-deoxy-2'-fluorouridine-3'-phosphate
  modified_base 14: mod_base = OTHER; note = 2'-deoxy-2'-fluoroguanosine-3'-phosphate
  modified_base 15: mod_base = OTHER; note = 2'-deoxy-2'-fluoroguanosine-3'-phosphate
  modified_base 16: mod_base = OTHER; note = 2'-O-methyluridine-3'-phosphate
  modified_base 17: mod_base = OTHER; note = 2'-deoxy-2'-fluorouridine-3'-phosphate
  modified_base 18: mod_base = OTHER; note = 2'-O-methyladenosine-3'-phosphate
  modified_base 19: mod_base = OTHER; note = 2'-deoxy-2'-fluorocytidine-3'-phosphate
  modified_base 20: mod_base = OTHER; note = 2'-deoxy-2'-fluoroadenosine-3'-phosphate
  modified_base 21: mod_base = OTHER; note = 2'-deoxy-2'-fluorouridine-3'-phosphorothioate
  modified_base 22: mod_base = OTHER; note = 2'-O-methylguanosine-3'-phosphorothioate
  modified_base 23: mod_base = OTHER; note = 2'-O-methyladenosine
atggaatactcttggttacatga

SEQ ID NO: 663 - RNA, 23 nt, synthetic construct
  source 1..23: mol_type = other RNA
  modified_base 1: mod_base = OTHER; note = 2'-deoxy-2'-fluoroadenosine-3'-phosphate
  modified_base 2: mod_base = OTHER; note = 2'-deoxy-2'-fluorouridine-3'-phosphate
  modified_base 3: mod_base = OTHER; note = 2'-deoxy-2'-fluoroguanosine-3'-phosphate
  modified_base 4: mod_base = OTHER; note = 2'-O-methylguanosine-3'-phosphate
  modified_base 5: mod_base = OTHER; note = 2'-deoxy-2'-fluoroadenosine-3'-phosphate
  modified_base 6: mod_base = OTHER; note = 2'-O-methyladenosine-3'-phosphate
  modified_base 7: mod_base = OTHER; note = 2'-deoxy-2'-fluorouridine-3'-phosphate
  modified_base 8: mod_base = OTHER; note = 2'-deoxy-2'-fluoroadenosine-3'-phosphate
  modified_base 9: mod_base = OTHER; note = 2'-deoxy-2'-fluorocytidine-3'-phosphate
  modified_base 10: mod_base = OTHER; note = 2'-O-methyluridine-3'-phosphate
  modified_base 11: mod_base = OTHER; note = 2'-deoxy-2'-fluorocytidine-3'-phosphate
  modified_base 12: mod_base = OTHER; note = 2'-O-methyluridine-3'-phosphate
  modified_base 13: mod_base = OTHER; note = 2'-deoxy-2'-fluorouridine-3'-phosphate
  modified_base 14: mod_base = OTHER; note = 2'-deoxy-2'-fluoroguanosine-3'-phosphate
  modified_base 15: mod_base = OTHER; note = 2'-deoxy-2'-fluoroguanosine-3'-phosphate
  modified_base 16: mod_base = OTHER; note = 2'-O-methyluridine-3'-phosphate
  modified_base 17: mod_base = OTHER; note = 2'-deoxy-2'-fluorouridine-3'-phosphate
  modified_base 18: mod_base = OTHER; note = 2'-O-methyladenosine-3'-phosphate
  modified_base 19: mod_base = OTHER; note = 2'-deoxy-2'-fluorocytidine-3'-phosphate
  modified_base 20: mod_base = OTHER; note = 2'-deoxy-2'-fluoroadenosine-3'-phosphate
  modified_base 21: mod_base = OTHER; note = 2'-O-methyluridine-3'-phosphorothioate
  modified_base 22: mod_base = OTHER; note = 2'-O-methylguanosine-3'-phosphorothioate
  modified_base 23: mod_base = OTHER; note = 2'-O-methyladenosine
atggaatactcttggttacatga

SEQ ID NO: 664 - DNA, 23 bp, synthetic construct
  source 1..23: mol_type = other DNA
  modified_base 2: mod_base = OTHER; note = uridine-3'-phosphate
  modified_base 4: mod_base = OTHER; note = guanosine-3'-phosphate
  modified_base 6: mod_base = OTHER; note = 2'-O-methyladenosine-3'-phosphate
  modified_base 7: mod_base = OTHER; note = 2'-O-methyluridine-3'-phosphate
  modified_base 8: mod_base = OTHER; note = 2'-deoxy-2'-fluoroadenosine-3'-phosphate
  modified_base 9: mod_base = OTHER; note = 2'-O-methylcytidine-3'-phosphate
  modified_base 10: mod_base = OTHER; note = 2'-deoxy-2'-fluorouridine-3'-phosphate
  modified_base 11: mod_base = OTHER; note = 2'-O-methylcytidine-3'-phosphate
  modified_base 12: mod_base = OTHER; note = 2'-deoxy-2'-fluorouridine-3'-phosphate
  modified_base 13: mod_base = OTHER; note = 2'-O-methyluridine-3'-phosphate
  modified_base 14: mod_base = OTHER; note = 2'-deoxy-2'-fluoroguanosine-3'-phosphate
  modified_base 15: mod_base = OTHER; note = 2'-O-methylguanosine-3'-phosphate
  modified_base 16: mod_base = OTHER; note = 2'-deoxy-2'-fluorouridine-3'-phosphate
  modified_base 17: mod_base = OTHER; note = 2'-O-methyluridine-3'-phosphate
  modified_base 18: mod_base = OTHER; note = 2'-deoxy-2'-fluoroadenosine-3'-phosphate
  modified_base 19: mod_base = OTHER; note = 2'-O-methylcytidine-3'-phosphate
  modified_base 20: mod_base = OTHER; note = 2'-deoxy-2'-fluoroadenosine-3'-phosphate
  modified_base 21: mod_base = OTHER; note = 2'-O-methyluridine-3'-phosphorothioate
  modified_base 22: mod_base = OTHER; note = 2'-deoxy-2'-fluoroguanosine-3'-phosphorothioate
  modified_base 23: mod_base = OTHER; note = 2'-O-methyladenosine
  misc_feature 2: note = RNA
  misc_feature 4: note = RNA
  misc_feature 6..23: note = RNA
  misc_feature 1: note = DNA
  misc_feature 5: note = DNA
atggaatactcttggttacatga

SEQ ID NO: 665 - DNA, 23 bp, synthetic construct
  source 1..23: mol_type = other DNA
  modified_base 2: mod_base = OTHER; note = uridine-3'-phosphate
  modified_base 4: mod_base = OTHER; note = 2'-O-methylguanosine-3'-phosphate
  modified_base 6: mod_base = OTHER; note = 2'-O-methyladenosine-3'-phosphate
  modified_base 7: mod_base = OTHER; note = 2'-O-methyluridine-3'-phosphate
  modified_base 8: mod_base = OTHER; note = 2'-deoxy-2'-fluoroadenosine-3'-phosphate
  modified_base 9: mod_base = OTHER; note = 2'-O-methylcytidine-3'-phosphate
  modified_base 10: mod_base = OTHER; note = 2'-deoxy-2'-fluorouridine-3'-phosphate
  modified_base 11: mod_base = OTHER; note = 2'-O-methylcytidine-3'-phosphate
  modified_base 12: mod_base = OTHER; note = 2'-deoxy-2'-fluorouridine-3'-phosphate
  modified_base 13: mod_base = OTHER; note = 2'-O-methyluridine-3'-phosphate
  modified_base 14: mod_base = OTHER; note = 2'-deoxy-2'-fluoroguanosine-3'-phosphate
  modified_base 15: mod_base = OTHER; note = 2'-O-methylguanosine-3'-phosphate
  modified_base 16: mod_base = OTHER; note = 2'-deoxy-2'-fluorouridine-3'-phosphate
  modified_base 17: mod_base = OTHER; note = 2'-O-methyluridine-3'-phosphate
  modified_base 18: mod_base = OTHER; note = 2'-deoxy-2'-fluoroadenosine-3'-phosphate
  modified_base 19: mod_base = OTHER; note = 2'-O-methylcytidine-3'-phosphate
  modified_base 20: mod_base = OTHER; note = 2'-deoxy-2'-fluoroadenosine-3'-phosphate
  modified_base 21: mod_base = OTHER; note = 2'-O-methyluridine-3'-phosphorothioate
  modified_base 22: mod_base = OTHER; note = 2'-deoxy-2'-fluoroguanosine-3'-phosphorothioate
  modified_base 23: mod_base = OTHER; note = 2'-O-methyladenosine
  misc_feature 2: note = RNA
  misc_feature 4: note = RNA
  misc_feature 6..23: note = RNA
  misc_feature 1: note = DNA
  misc_feature 5: note = DNA
atggaatactcttggttacatga

SEQ ID NO: 666 - DNA, 23 bp, synthetic construct
  source 1..23: mol_type = other DNA
  modified_base 2: mod_base = OTHER; note = 2'-O-methyluridine-3'-phosphate
  modified_base 4: mod_base = OTHER; note = 2'-O-methylguanosine-3'-phosphate
  modified_base 6: mod_base = OTHER; note = 2'-O-methyladenosine-3'-phosphate
  modified_base 7: mod_base = OTHER; note = 2'-O-methyluridine-3'-phosphate
  modified_base 8: mod_base = OTHER; note = 2'-deoxy-2'-fluoroadenosine-3'-phosphate
  modified_base 9: mod_base = OTHER; note = 2'-O-methylcytidine-3'-phosphate
  modified_base 10: mod_base = OTHER; note = 2'-deoxy-2'-fluorouridine-3'-phosphate
  modified_base 11: mod_base = OTHER; note = 2'-O-methylcytidine-3'-phosphate
  modified_base 12: mod_base = OTHER; note = 2'-deoxy-2'-fluorouridine-3'-phosphate
  modified_base 13: mod_base = OTHER; note = 2'-O-methyluridine-3'-phosphate
  modified_base 14: mod_base = OTHER; note = 2'-deoxy-2'-fluoroguanosine-3'-phosphate
  modified_base 15: mod_base = OTHER; note = 2'-O-methylguanosine-3'-phosphate
  modified_base 16: mod_base = OTHER; note = 2'-deoxy-2'-fluorouridine-3'-phosphate
  modified_base 17: mod_base = OTHER; note = 2'-O-methyluridine-3'-phosphate
  modified_base 18: mod_base = OTHER; note = 2'-deoxy-2'-fluoroadenosine-3'-phosphate
  modified_base 19: mod_base = OTHER; note = 2'-O-methylcytidine-3'-phosphate
  modified_base 20: mod_base = OTHER; note = 2'-deoxy-2'-fluoroadenosine-3'-phosphate
  modified_base 21: mod_base = OTHER; note = 2'-O-methyluridine-3'-phosphorothioate
  modified_base 22: mod_base = OTHER; note = 2'-deoxy-2'-fluoroguanosine-3'-phosphorothioate
  modified_base 23: mod_base = OTHER; note = 2'-O-methyladenosine
  misc_feature 2: note = RNA
  misc_feature 4: note = RNA
  misc_feature 6..23: note = RNA
  misc_feature 1: note = DNA
  misc_feature 5: note = DNA
atggaatactcttggttacatga

SEQ ID NO: 667 - DNA, 23 bp, synthetic construct
  source 1..23: mol_type = other DNA
  modified_base 2: mod_base = OTHER; note = uridine-3'-phosphate
  modified_base 4: mod_base = OTHER; note = 2'-O-methylguanosine-3'-phosphate
  modified_base 6: mod_base = OTHER; note = 2'-O-methyladenosine-3'-phosphate
  modified_base 8: mod_base = OTHER; note = 2'-deoxy-2'-fluoroadenosine-3'-phosphate
  modified_base 9: mod_base = OTHER; note = 2'-O-methylcytidine-3'-phosphate
  modified_base 10: mod_base = OTHER; note = 2'-deoxy-2'-fluorouridine-3'-phosphate
  modified_base 11: mod_base = OTHER; note = 2'-O-methylcytidine-3'-phosphate
  modified_base 12: mod_base = OTHER; note = 2'-deoxy-2'-fluorouridine-3'-phosphate
  modified_base 13: mod_base = OTHER; note = 2'-O-methyluridine-3'-phosphate
  modified_base 14: mod_base = OTHER; note = 2'-deoxy-2'-fluoroguanosine-3'-phosphate
  modified_base 15: mod_base = OTHER; note = 2'-O-methylguanosine-3'-phosphate
  modified_base 16: mod_base = OTHER; note = 2'-deoxy-2'-fluorouridine-3'-phosphate
  modified_base 17: mod_base = OTHER; note = 2'-O-methyluridine-3'-phosphate
  modified_base 18: mod_base = OTHER; note = 2'-deoxy-2'-fluoroadenosine-3'-phosphate
  modified_base 19: mod_base = OTHER; note = 2'-O-methylcytidine-3'-phosphate
  modified_base 20: mod_base = OTHER; note = 2'-deoxy-2'-fluoroadenosine-3'-phosphate
  modified_base 21: mod_base = OTHER; note = 2'-O-methyluridine-3'-phosphorothioate
  modified_base 22: mod_base = OTHER; note = 2'-deoxy-2'-fluoroguanosine-3'-phosphorothioate
  modified_base 23: mod_base = OTHER; note = 2'-O-methyladenosine
  misc_feature 2: note = RNA
  misc_feature 4: note = RNA
  misc_feature 6: note = RNA
  misc_feature 8..23: note = RNA
  misc_feature 1: note = DNA
  misc_feature 5: note = DNA
  misc_feature 7: note = DNA
atggaatactcttggttacatga

SEQ ID NO: 668 - DNA, 23 bp, synthetic construct
  source 1..23: mol_type = other DNA
  modified_base 2: mod_base = OTHER; note = uridine-3'-phosphate
  modified_base 4: mod_base = OTHER; note = guanosine-3'-phosphate
  modified_base 6: mod_base = OTHER; note = 2'-deoxy-2'-fluoroadenosine-3'-phosphate
  modified_base 7: mod_base = OTHER; note = 2'-O-methyluridine-3'-phosphate
  modified_base 8: mod_base = OTHER; note = 2'-deoxy-2'-fluoroadenosine-3'-phosphate
  modified_base 9: mod_base = OTHER; note = 2'-O-methylcytidine-3'-phosphate
  modified_base 10: mod_base = OTHER; note = 2'-deoxy-2'-fluorouridine-3'-phosphate
  modified_base 11: mod_base = OTHER; note = 2'-O-methylcytidine-3'-phosphate
  modified_base 12: mod_base = OTHER; note = 2'-deoxy-2'-fluorouridine-3'-phosphate
  modified_base 13: mod_base = OTHER; note = 2'-O-methyluridine-3'-phosphate
  modified_base 14: mod_base = OTHER; note = 2'-deoxy-2'-fluoroguanosine-3'-phosphate
  modified_base 15: mod_base = OTHER; note = 2'-deoxy-2'-fluoroguanosine-3'-phosphate
  modified_base 16: mod_base = OTHER; note = 2'-deoxy-2'-fluorouridine-3'-phosphate
  modified_base 17: mod_base = OTHER; note = 2'-O-methyluridine-3'-phosphate
  modified_base 18: mod_base = OTHER; note = 2'-deoxy-2'-fluoroadenosine-3'-phosphate
  modified_base 19: mod_base = OTHER; note = 2'-deoxy-2'-fluorocytidine-3'-phosphate
  modified_base 20: mod_base = OTHER; note = 2'-deoxy-2'-fluoroadenosine-3'-phosphate
  modified_base 21: mod_base = OTHER; note = 2'-O-methyluridine-3'-phosphorothioate
  modified_base 22: mod_base = OTHER; note = 2'-deoxy-2'-fluoroguanosine-3'-phosphorothioate
  modified_base 23: mod_base = OTHER; note = 2'-O-methyladenosine
  misc_feature 2: note = RNA
  misc_feature 4: note = RNA
  misc_feature 6..23: note = RNA
  misc_feature 1: note = DNA
  misc_feature 5: note = DNA
atggaatactcttggttacatga

SEQ ID NO: 669 - DNA, 23 bp, synthetic construct
  source 1..23: mol_type = other DNA
  modified_base 2: mod_base = OTHER; note = uridine-3'-phosphate
  modified_base 4: mod_base = OTHER; note = 2'-O-methylguanosine-3'-phosphate
  modified_base 6: mod_base = OTHER; note = 2'-O-methyladenosine-3'-phosphate
  modified_base 8: mod_base = OTHER; note = 2'-deoxy-2'-fluoroadenosine-3'-phosphate
  modified_base 10: mod_base = OTHER; note = 2'-deoxy-2'-fluorouridine-3'-phosphate
  modified_base 11: mod_base = OTHER; note = 2'-O-methylcytidine-3'-phosphate
  modified_base 12: mod_base = OTHER; note = 2'-deoxy-2'-fluorouridine-3'-phosphate
  modified_base 13: mod_base = OTHER; note = 2'-O-methyluridine-3'-phosphate
  modified_base 14: mod_base = OTHER; note = 2'-deoxy-2'-fluoroguanosine-3'-phosphate
  modified_base 15: mod_base = OTHER; note = 2'-O-methylguanosine-3'-phosphate
  modified_base 16: mod_base = OTHER; note = 2'-deoxy-2'-fluorouridine-3'-phosphate
  modified_base 17: mod_base = OTHER; note = 2'-O-methyluridine-3'-phosphate
  modified_base 18: mod_base = OTHER; note = 2'-deoxy-2'-fluoroadenosine-3'-phosphate
  modified_base 19: mod_base = OTHER; note = 2'-O-methylcytidine-3'-phosphate
  modified_base 20: mod_base = OTHER; note = 2'-deoxy-2'-fluoroadenosine-3'-phosphate
  modified_base 21: mod_base = OTHER; note = 2'-O-methyluridine-3'-phosphorothioate
  modified_base 22: mod_base = OTHER; note = 2'-deoxy-2'-fluoroguanosine-3'-phosphorothioate
  modified_base 23: mod_base = OTHER; note = 2'-O-methyladenosine
  misc_feature 2: note = RNA
  misc_feature 4: note = RNA
  misc_feature 6: note = RNA
  misc_feature 8: note = RNA
  misc_feature 10..23: note = RNA
  misc_feature 1: note = DNA
  misc_feature 5: note = DNA
  misc_feature 7: note = DNA
  misc_feature 9: note = DNA
atggaatactcttggttacatga

SEQ ID NO: 670 - DNA, 23 bp, synthetic construct
  source 1..23: mol_type = other DNA
  modified_base 2: mod_base = OTHER; note = uridine-3'-phosphate
  modified_base 4: mod_base = OTHER; note = guanosine-3'-phosphate
  modified_base 6: mod_base = OTHER; note = adenosine-3'-phosphate
  modified_base 7: mod_base = OTHER; note = 2'-O-methyluridine-3'-phosphate
  modified_base 8: mod_base = OTHER; note = 2'-deoxy-2'-fluoroadenosine-3'-phosphate
  modified_base 9: mod_base = OTHER; note = 2'-O-methylcytidine-3'-phosphate
  modified_base 10: mod_base = OTHER; note = 2'-deoxy-2'-fluorouridine-3'-phosphate
  modified_base 11: mod_base = OTHER; note = 2'-O-methylcytidine-3'-phosphate
  modified_base 12: mod_base = OTHER; note = 2'-deoxy-2'-fluorouridine-3'-phosphate
  modified_base 13: mod_base = OTHER; note = 2'-O-methyluridine-3'-phosphate
  modified_base 14: mod_base = OTHER; note = 2'-deoxy-2'-fluoroguanosine-3'-phosphate
  modified_base 15: mod_base = OTHER; note = 2'-O-methylguanosine-3'-phosphate
  modified_base 16: mod_base = OTHER; note = 2'-deoxy-2'-fluorouridine-3'-phosphate
  modified_base 17: mod_base = OTHER; note = 2'-O-methyluridine-3'-phosphate
  modified_base 18: mod_base = OTHER; note = 2'-deoxy-2'-fluoroadenosine-3'-phosphate
  modified_base 19: mod_base = OTHER; note = 2'-O-methylcytidine-3'-phosphate
  modified_base 20: mod_base = OTHER; note = 2'-deoxy-2'-fluoroadenosine-3'-phosphate
  modified_base 21: mod_base = OTHER; note = 2'-O-methyluridine-3'-phosphorothioate
  modified_base 22: mod_base = OTHER; note = 2'-deoxy-2'-fluoroguanosine-3'-phosphorothioate
  modified_base 23: mod_base = OTHER; note = 2'-O-methyladenosine
  misc_feature 2: note = RNA
  misc_feature 4: note = RNA
  misc_feature 6..23: note = RNA
  misc_feature 1: note = DNA
  misc_feature 5: note = DNA
atggaatactcttggttacatga

SEQ ID NO: 671 - DNA, 23 bp, synthetic construct
  source 1..23: mol_type = other DNA
  modified_base 2: mod_base = OTHER; note = 2'-O-methyluridine-3'-phosphate
  modified_base 4: mod_base = OTHER; note = 2'-O-methylguanosine-3'-phosphate
  modified_base 6: mod_base = OTHER; note = 2'-O-methyladenosine-3'-phosphate
  modified_base 8: mod_base = OTHER; note = 2'-deoxy-2'-fluoroadenosine-3'-phosphate
  modified_base 9: mod_base = OTHER; note = 2'-O-methylcytidine-3'-phosphate
  modified_base 10: mod_base = OTHER; note = 2'-deoxy-2'-fluorouridine-3'-phosphate
  modified_base 11: mod_base = OTHER; note = 2'-O-methylcytidine-3'-phosphate
  modified_base 12: mod_base = OTHER; note = 2'-deoxy-2'-fluorouridine-3'-phosphate
  modified_base 13: mod_base = OTHER; note = 2'-O-methyluridine-3'-phosphate
  modified_base 14: mod_base = OTHER; note = 2'-deoxy-2'-fluoroguanosine-3'-phosphate
  modified_base 15: mod_base = OTHER; note = 2'-O-methylguanosine-3'-phosphate
  modified_base 16: mod_base = OTHER; note = 2'-deoxy-2'-fluorouridine-3'-phosphate
  modified_base 17: mod_base = OTHER; note = 2'-O-methyluridine-3'-phosphate
  modified_base 18: mod_base = OTHER; note = 2'-deoxy-2'-fluoroadenosine-3'-phosphate
  modified_base 19: mod_base = OTHER; note = 2'-O-methylcytidine-3'-phosphate
  modified_base 20: mod_base = OTHER; note = 2'-deoxy-2'-fluoroadenosine-3'-phosphate
  modified_base 21: mod_base = OTHER; note = 2'-O-methyluridine-3'-phosphorothioate
  modified_base 22: mod_base = OTHER; note = 2'-deoxy-2'-fluoroguanosine-3'-phosphorothioate
  modified_base 23: mod_base = OTHER; note = 2'-O-methyladenosine
  misc_feature 2: note = RNA
  misc_feature 4: note = RNA
  misc_feature 6: note = RNA
  misc_feature 8..23: note = RNA
  misc_feature 1: note = DNA
  misc_feature 5: note = DNA
  misc_feature 7: note = DNA
atggaatactcttggttacatga

SEQ ID NO: 672 - DNA, 23 bp, synthetic construct
  source 1..23: mol_type = other DNA
  modified_base 5: mod_base = OTHER; note = 2'-O-methyladenosine-3'-phosphate
  modified_base 6: mod_base = OTHER; note = 2'-deoxy-2'-fluoroadenosine-3'-phosphate
  modified_base 7: mod_base = OTHER; note = 2'-O-methyluridine-3'-phosphate
  modified_base 8: mod_base = OTHER; note = 2'-deoxy-2'-fluoroadenosine-3'-phosphate
  modified_base 9: mod_base = OTHER; note = 2'-O-methylcytidine-3'-phosphate
  modified_base 10: mod_base = OTHER; note = 2'-deoxy-2'-fluorouridine-3'-phosphate
  modified_base 11: mod_base = OTHER; note = 2'-O-methylcytidine-3'-phosphate
  modified_base 12: mod_base = OTHER; note = 2'-deoxy-2'-fluorouridine-3'-phosphate
  modified_base 13: mod_base = OTHER; note = 2'-O-methyluridine-3'-phosphate
  modified_base 14: mod_base = OTHER; note = 2'-deoxy-2'-fluoroguanosine-3'-phosphate
  modified_base 15: mod_base = OTHER; note = 2'-O-methylguanosine-3'-phosphate
  modified_base 16: mod_base = OTHER; note = 2'-deoxy-2'-fluorouridine-3'-phosphate
  modified_base 17: mod_base = OTHER; note = 2'-O-methyluridine-3'-phosphate
  modified_base 18: mod_base = OTHER; note = 2'-deoxy-2'-fluoroadenosine-3'-phosphate
  modified_base 19: mod_base = OTHER; note = 2'-O-methylcytidine-3'-phosphate
  modified_base 20: mod_base = OTHER; note = 2'-deoxy-2'-fluoroadenosine-3'-phosphate
  modified_base 21: mod_base = OTHER; note = 2'-O-methyluridine-3'-phosphorothioate
  modified_base 22: mod_base = OTHER; note = 2'-deoxy-2'-fluoroguanosine-3'-phosphorothioate
  modified_base 23: mod_base = OTHER; note = 2'-O-methyladenosine
  misc_feature 5..23: note = RNA
  misc_feature 1..4: note = DNA
atggaatactcttggttacatga

SEQ ID NO: 673 - DNA, 23 bp, synthetic construct
  source 1..23: mol_type = other DNA
  modified_base 2: mod_base = OTHER; note = uridine-3'-phosphate
  modified_base 4: mod_base = OTHER; note = 2'-O-methyluridine-3'-phosphate
  modified_base 6: mod_base = OTHER; note = 2'-O-methylguanosine-3'-phosphate
  modified_base 8: mod_base = OTHER; note = 2'-deoxy-2'-fluoroguanosine-3'-phosphate
  modified_base 9: mod_base = OTHER; note = 2'-O-methylcytidine-3'-phosphate
  modified_base 10: mod_base = OTHER; note = 2'-deoxy-2'-fluoroadenosine-3'-phosphate
  modified_base 11: mod_base = OTHER; note = 2'-O-methyladenosine-3'-phosphate
  modified_base 12: mod_base = OTHER; note = 2'-deoxy-2'-fluoroguanosine-3'-phosphate
  modified_base 13: mod_base = OTHER; note = 2'-O-methyladenosine-3'-phosphate
  modified_base 14: mod_base = OTHER; note = 2'-deoxy-2'-fluoroadenosine-3'-phosphate
  modified_base 15: mod_base = OTHER; note = 2'-O-methylcytidine-3'-phosphate
  modified_base 16: mod_base = OTHER; note = 2'-deoxy-2'-fluoroadenosine-3'-phosphate
  modified_base 17: mod_base = OTHER; note = 2'-O-methylcytidine-3'-phosphate
  modified_base 18: mod_base = OTHER; note = 2'-deoxy-2'-fluorouridine-3'-phosphate
  modified_base 19: mod_base = OTHER; note = 2'-O-methylguanosine-3'-phosphate
  modified_base 20: mod_base = OTHER; note = 2'-deoxy-2'-fluorouridine-3'-phosphate
  modified_base 21: mod_base = OTHER; note = 2'-O-methyluridine-3'-phosphorothioate
  modified_base 22: mod_base = OTHER; note = 2'-deoxy-2'-fluorouridine-3'-phosphorothioate
  modified_base 23: mod_base = OTHER; note = 2'-O-methyluridine
  misc_feature 2: note = RNA
  misc_feature 4: note = RNA
  misc_feature 6: note = RNA
  misc_feature 8..23: note = RNA
  misc_feature 1: note = DNA
  misc_feature 5: note = DNA
  misc_feature 7: note = DNA
ttatagagcaagaacactgtttt

SEQ ID NO: 674 - RNA, 23 nt, synthetic construct
  source 1..23: mol_type = other RNA
  modified_base 1: mod_base = OTHER; note = 2'-deoxy-2'-fluorouridine-3'-phosphate
  modified_base 2: mod_base = OTHER; note = 2'-deoxy-2'-fluorouridine-3'-phosphate
  modified_base 3: mod_base = OTHER; note = 2'-O-methyladenosine-3'-phosphate
  modified_base 4: mod_base = OTHER; note = 2'-deoxy-2'-fluorouridine-3'-phosphate
  modified_base 5: mod_base = OTHER; note = 2'-O-methyladenosine-3'-phosphate
  modified_base 6: mod_base = OTHER; note = 2'-deoxy-2'-fluoroguanosine-3'-phosphate
  modified_base 7: mod_base = OTHER; note = 2'-O-methyladenosine-3'-phosphate
  modified_base 8: mod_base = OTHER; note = 2'-O-methylguanosine-3'-phosphate
  modified_base 9: mod_base = OTHER; note = 2'-O-methylcytidine-3'-phosphate
  modified_base 10: mod_base = OTHER; note = 2'-deoxy-2'-fluoroadenosine-3'-phosphate
  modified_base 11: mod_base = OTHER; note = 2'-O-methyladenosine-3'-phosphate
  modified_base 12: mod_base = OTHER; note = 2'-deoxy-2'-fluoroguanosine-3'-phosphate
  modified_base 13: mod_base = OTHER; note = 2'-O-methyladenosine-3'-phosphate
  modified_base 14: mod_base = OTHER; note = 2'-deoxy-2'-fluoroadenosine-3'-phosphate
  modified_base 15: mod_base = OTHER; note = 2'-O-methylcytidine-3'-phosphate
  modified_base 16: mod_base = OTHER; note = 2'-deoxy-2'-fluoroadenosine-3'-phosphate
  modified_base 17: mod_base = OTHER; note = 2'-O-methylcytidine-3'-phosphate
  modified_base 18: mod_base = OTHER; note = 2'-deoxy-2'-fluorouridine-3'-phosphate
  modified_base 19: mod_base = OTHER; note = 2'-O-methylguanosine-3'-phosphate
  modified_base 20: mod_base = OTHER; note = 2'-deoxy-2'-fluorouridine-3'-phosphate
  modified_base 21: mod_base = OTHER; note = 2'-O-methyluridine-3'-phosphorothioate
  modified_base 22: mod_base = OTHER; note = 2'-deoxy-2'-fluorouridine-3'-phosphorothioate
  modified_base 23: mod_base = OTHER; note = 2'-O-methyluridine
ttatagagcaagaacactgtttt

SEQ ID NO: 675 - RNA, 23 nt, synthetic construct
  source 1..23: mol_type = other RNA
  modified_base 1: mod_base = OTHER; note = 2'-O-methyluridine-3'-phosphate
  modified_base 2: mod_base = OTHER; note = 2'-deoxy-2'-fluorouridine-3'-phosphate
  modified_base 3: mod_base = OTHER; note = 2'-O-methyladenosine-3'-phosphate
  modified_base 4: mod_base = OTHER; note = 2'-O-methyluridine-3'-phosphate
  modified_base 5: mod_base = OTHER; note = 2'-O-methyladenosine-3'-phosphate
  modified_base 6: mod_base = OTHER; note = 2'-deoxy-2'-fluoroguanosine-3'-phosphate
  modified_base 7: mod_base = OTHER; note = 2'-O-methyladenosine-3'-phosphate
  modified_base 8: mod_base = OTHER; note = 2'-deoxy-2'-fluoroguanosine-3'-phosphate
  modified_base 9: mod_base = OTHER; note = 2'-deoxy-2'-fluorocytidine-3'-phosphate
  modified_base 10: mod_base = OTHER; note = 2'-deoxy-2'-fluoroadenosine-3'-phosphate
  modified_base 11: mod_base = OTHER; note = 2'-O-methyladenosine-3'-phosphate
  modified_base 12: mod_base = OTHER; note = 2'-deoxy-2'-fluoroguanosine-3'-phosphate
  modified_base 13: mod_base = OTHER; note = 2'-O-methyladenosine-3'-phosphate
  modified_base 14: mod_base = OTHER; note = 2'-deoxy-2'-fluoroadenosine-3'-phosphate
  modified_base 15: mod_base = OTHER; note = 2'-O-methylcytidine-3'-phosphate
  modified_base 16: mod_base = OTHER; note = 2'-deoxy-2'-fluoroadenosine-3'-phosphate
  modified_base 17: mod_base = OTHER; note = 2'-O-methylcytidine-3'-phosphate
  modified_base 18: mod_base = OTHER; note = 2'-deoxy-2'-fluorouridine-3'-phosphate
  modified_base 19: mod_base = OTHER; note = 2'-O-methylguanosine-3'-phosphate
  modified_base 20: mod_base = OTHER; note = 2'-deoxy-2'-fluorouridine-3'-phosphate
  modified_base 21: mod_base = OTHER; note = 2'-O-methyluridine-3'-phosphorothioate
  modified_base 22: mod_base = OTHER; note = 2'-deoxy-2'-fluorouridine-3'-phosphorothioate
  modified_base 23: mod_base = OTHER; note = 2'-O-methyluridine
ttatagagcaagaacactgtttt

SEQ ID NO: 676 - RNA, 23 nt, synthetic construct
  source 1..23: mol_type = other RNA
  modified_base 1: mod_base = OTHER; note = 2'-O-methyluridine-3'-phosphate
  modified_base 2: mod_base = OTHER; note = 2'-deoxy-2'-fluorouridine-3'-phosphate
  modified_base 3: mod_base = OTHER; note = 2'-O-methyladenosine-3'-phosphate
  modified_base 4: mod_base = OTHER; note = 2'-O-methyluridine-3'-phosphate
  modified_base 5: mod_base = OTHER; note = 2'-O-methyladenosine-3'-phosphate
  modified_base 6: mod_base = OTHER; note = 2'-deoxy-2'-fluoroguanosine-3'-phosphate
  modified_base 7: mod_base = OTHER; note = 2'-deoxy-2'-fluoroadenosine-3'-phosphate
  modified_base 8: mod_base = OTHER; note = 2'-deoxy-2'-fluoroguanosine-3'-phosphate
  modified_base 9: mod_base = OTHER; note = 2'-O-methylcytidine-3'-phosphate
  modified_base 10: mod_base = OTHER; note = 2'-deoxy-2'-fluoroadenosine-3'-phosphate
  modified_base 11: mod_base = OTHER; note = 2'-O-methyladenosine-3'-phosphate
  modified_base 12: mod_base = OTHER; note = 2'-deoxy-2'-fluoroguanosine-3'-phosphate
  modified_base 13: mod_base = OTHER; note = 2'-O-methyladenosine-3'-phosphate
  modified_base 14: mod_base = OTHER; note = 2'-deoxy-2'-fluoroadenosine-3'-phosphate
  modified_base 15: mod_base = OTHER; note = 2'-O-methylcytidine-3'-phosphate
  modified_base 16: mod_base = OTHER; note = 2'-deoxy-2'-fluoroadenosine-3'-phosphate
  modified_base 17: mod_base = OTHER; note = 2'-O-methylcytidine-3'-phosphate
  modified_base 18: mod_base = OTHER; note = 2'-deoxy-2'-fluorouridine-3'-phosphate
  modified_base 19: mod_base = OTHER; note = 2'-O-methylguanosine-3'-phosphate
  modified_base 20: mod_base = OTHER; note = 2'-deoxy-2'-fluorouridine-3'-phosphate
  modified_base 21: mod_base = OTHER; note = 2'-O-methyluridine-3'-phosphorothioate
  modified_base 22: mod_base = OTHER; note = 2'-deoxy-2'-fluorouridine-3'-phosphorothioate
  modified_base 23: mod_base = OTHER; note = 2'-O-methyluridine
ttatagagcaagaacactgtttt

SEQ ID NO: 677 - DNA, 21 bp, synthetic construct
  source 1..21: mol_type = other DNA
  modified_base 1: mod_base = OTHER; note = uridine-3'-phosphate
  modified_base 2: mod_base = OTHER; note = 2'-O-methyluridine-3'-phosphate
  modified_base 3: mod_base = OTHER; note = adenosine-3'-phosphate
  modified_base 4: mod_base = OTHER; note = 2'-O-methyluridine-3'-phosphate
  modified_base 5: mod_base = OTHER; note = adenosine-3'-phosphate
  modified_base 6: mod_base = OTHER; note = guanosine-3'-phosphate
  modified_base 7: mod_base = OTHER; note = adenosine-3'-phosphate
  modified_base 8: mod_base = OTHER; note = guanosine-3'-phosphate
  modified_base 9: mod_base = OTHER; note = 2'-O-methylcytidine-3'-phosphate
  modified_base 10: mod_base = OTHER; note = adenosine-3'-phosphate
  modified_base 11: mod_base = OTHER; note = adenosine-3'-phosphate
  modified_base 12: mod_base = OTHER; note = guanosine-3'-phosphate
  modified_base 13: mod_base = OTHER; note = adenosine-3'-phosphate
  modified_base 14: mod_base = OTHER; note = adenosine-3'-phosphate
  modified_base 15: mod_base = OTHER; note = 2'-O-methylcytidine-3'-phosphate
  modified_base 16: mod_base = OTHER; note = adenosine-3'-phosphate
  modified_base 17: mod_base = OTHER; note = cytidine-3'-phosphate
  modified_base 18: mod_base = OTHER; note = uridine-3'-phosphate
  modified_base 19: mod_base = OTHER; note = guanosine-3'-phosphate
  misc_feature 1..19: note = RNA
  misc_feature 20..21: note = DNA
ttatagagcaagaacactgtt

SEQ ID NO: 678 - RNA, 23 nt, synthetic construct
  source 1..23: mol_type = other RNA
  modified_base 1: mod_base = OTHER; note = 2'-O-methyluridine-3'-phosphate
  modified_base 2: mod_base = OTHER; note = 2'-deoxy-2'-fluorouridine-3'-phosphate
  modified_base 3: mod_base = OTHER; note = 2'-O-methyladenosine-3'-phosphate
  modified_base 4: mod_base = OTHER; note = 2'-deoxy-2'-fluorouridine-3'-phosphate
  modified_base 5: mod_base = OTHER; note = 2'-O-methyladenosine-3'-phosphate
  modified_base 6: mod_base = OTHER; note = 2'-O-methylguanosine-3'-phosphate
  modified_base 7: mod_base = OTHER; note = 2'-O-methyladenosine-3'-phosphate
  modified_base 8: mod_base = OTHER; note = 2'-deoxy-2'-fluoroguanosine-3'-phosphate
  modified_base 9: mod_base = OTHER; note = 2'-deoxy-2'-fluorocytidine-3'-phosphate
  modified_base 10: mod_base = OTHER; note = 2'-deoxy-2'-fluoroadenosine-3'-phosphate
  modified_base 11: mod_base = OTHER; note = 2'-O-methyladenosine-3'-phosphate
  modified_base 12: mod_base = OTHER; note = 2'-deoxy-2'-fluoroguanosine-3'-phosphate
  modified_base 13: mod_base = OTHER; note = 2'-O-methyladenosine-3'-phosphate
  modified_base 14: mod_base = OTHER; note = 2'-deoxy-2'-fluoroadenosine-3'-phosphate
  modified_base 15: mod_base = OTHER; note = 2'-O-methylcytidine-3'-phosphate
  modified_base 16: mod_base = OTHER; note = 2'-deoxy-2'-fluoroadenosine-3'-phosphate
  modified_base 17: mod_base = OTHER; note = 2'-O-methylcytidine-3'-phosphate
  modified_base 18: mod_base = OTHER; note = 2'-deoxy-2'-fluorouridine-3'-phosphate
  modified_base 19: mod_base = OTHER; note = 2'-O-methylguanosine-3'-phosphate
  modified_base 20: mod_base = OTHER; note = 2'-deoxy-2'-fluorouridine-3'-phosphate
  modified_base 21: mod_base = OTHER; note = 2'-O-methyluridine-3'-phosphorothioate
  modified_base 22: mod_base = OTHER; note = 2'-deoxy-2'-fluorouridine-3'-phosphorothioate
  modified_base 23: mod_base = OTHER; note = 2'-O-methyluridine
ttatagagcaagaacactgtttt

SEQ ID NO: 679 - RNA, 23 nt, synthetic construct
  source 1..23: mol_type = other RNA
  modified_base 1: mod_base = OTHER; note = 2'-deoxy-2'-fluorouridine-3'-phosphate
  modified_base 2: mod_base = OTHER; note = 2'-deoxy-2'-fluorouridine-3'-phosphate
  modified_base 3: mod_base = OTHER; note = 2'-O-methyladenosine-3'-phosphate
  modified_base 4: mod_base = OTHER; note = 2'-deoxy-2'-fluorouridine-3'-phosphate
  modified_base 5: mod_base = OTHER; note = 2'-O-methyladenosine-3'-phosphate
  modified_base 6: mod_base = OTHER; note = 2'-deoxy-2'-fluoroguanosine-3'-phosphate
  modified_base 7: mod_base = OTHER; note = 2'-O-methyladenosine-3'-phosphate
  modified_base 8: mod_base = OTHER; note = 2'-deoxy-2'-fluoroguanosine-3'-phosphate
  modified_base 9: mod_base = OTHER; note = 2'-O-methylcytidine-3'-phosphate
  modified_base 10: mod_base = OTHER; note = 2'-deoxy-2'-fluoroadenosine-3'-phosphate
  modified_base 11: mod_base = OTHER; note = 2'-O-methyladenosine-3'-phosphate
  modified_base 12: mod_base = OTHER; note = 2'-O-methylguanosine-3'-phosphate
  modified_base 13: mod_base = OTHER; note = 2'-O-methyladenosine-3'-phosphate
  modified_base 14: mod_base = OTHER; note = 2'-deoxy-2'-fluoroadenosine-3'-phosphate
  modified_base 15: mod_base = OTHER; note = 2'-O-methylcytidine-3'-phosphate
  modified_base 16: mod_base = OTHER; note = 2'-deoxy-2'-fluoroadenosine-3'-phosphate
  modified_base 17: mod_base = OTHER; note = 2'-O-methylcytidine-3'-phosphate
  modified_base 18: mod_base = OTHER; note = 2'-deoxy-2'-fluorouridine-3'-phosphate
  modified_base 19: mod_base = OTHER; note = 2'-O-methylguanosine-3'-phosphate
  modified_base 20: mod_base = OTHER; note = 2'-deoxy-2'-fluorouridine-3'-phosphate
  modified_base 21: mod_base = OTHER; note = 2'-O-methyluridine-3'-phosphorothioate
  modified_base 22: mod_base = OTHER; note = 2'-deoxy-2'-fluorouridine-3'-phosphorothioate
  modified_base 23: mod_base = OTHER; note = 2'-O-methyluridine
ttatagagcaagaacactgtttt

SEQ ID NO: 680 - RNA, 23 nt, synthetic construct
  source 1..23: mol_type = other RNA
  modified_base 1: mod_base = OTHER; note = 2'-deoxy-2'-fluorouridine-3'-phosphate
  modified_base 2: mod_base = OTHER; note = 2'-deoxy-2'-fluorouridine-3'-phosphate
  modified_base 3: mod_base = OTHER; note = 2'-O-methyladenosine-3'-phosphate
  modified_base 4: mod_base = OTHER; note = 2'-deoxy-2'-fluorouridine-3'-phosphate
  modified_base 5: mod_base = OTHER; note = 2'-O-methyladenosine-3'-phosphate
  modified_base 6: mod_base = OTHER; note = 2'-O-methylguanosine-3'-phosphate
  modified_base 7: mod_base = OTHER; note = 2'-O-methyladenosine-3'-phosphate
  modified_base 8: mod_base = OTHER; note = 2'-deoxy-2'-fluoroguanosine-3'-phosphate
  modified_base 9: mod_base = OTHER; note = 2'-O-methylcytidine-3'-phosphate
  modified_base 10: mod_base = OTHER; note = 2'-deoxy-2'-fluoroadenosine-3'-phosphate
  modified_base 11: mod_base = OTHER; note = 2'-O-methyladenosine-3'-phosphate
  modified_base 12: mod_base = OTHER; note = 2'-deoxy-2'-fluoroguanosine-3'-phosphate
  modified_base 13: mod_base = OTHER; note = 2'-O-methyladenosine-3'-phosphate
  modified_base 14: mod_base = OTHER; note = 2'-deoxy-2'-fluoroadenosine-3'-phosphate
  modified_base 15: mod_base = OTHER; note = 2'-O-methylcytidine-3'-phosphate
  modified_base 16: mod_base = OTHER; note = 2'-deoxy-2'-fluoroadenosine-3'-phosphate
  modified_base 17: mod_base = OTHER; note = 2'-O-methylcytidine-3'-phosphate
  modified_base 18: mod_base = OTHER; note = 2'-deoxy-2'-fluorouridine-3'-phosphate
  modified_base 19: mod_base = OTHER; note = 2'-O-methylguanosine-3'-phosphate
  modified_base 20: mod_base = OTHER; note = 2'-deoxy-2'-fluorouridine-3'-phosphate
  modified_base 21: mod_base = OTHER; note = 2'-O-methyluridine-3'-phosphorothioate
  modified_base 22: mod_base = OTHER; note = 2'-deoxy-2'-fluorouridine-3'-phosphorothioate
  modified_base 23: mod_base = OTHER; note = 2'-O-methyluridine
ttatagagcaagaacactgtttt

SEQ ID NO: 681 - RNA, 23 nt, synthetic construct
  source 1..23: mol_type = other RNA
  modified_base 1: mod_base = OTHER; note = 2'-deoxy-2'-fluorouridine-3'-phosphate
  modified_base 2: mod_base = OTHER; note = 2'-deoxy-2'-fluorouridine-3'-phosphate
  modified_base 3: mod_base = OTHER; note = 2'-O-methyladenosine-3'-phosphate
  modified_base 4: mod_base = OTHER; note = 2'-deoxy-2'-fluorouridine-3'-phosphate
  modified_base 5: mod_base = OTHER; note = 2'-O-methyladenosine-3'-phosphate
  modified_base 6: mod_base = OTHER; note = 2'-deoxy-2'-fluoroguanosine-3'-phosphate
  modified_base 7: mod_base = OTHER; note = 2'-O-methyladenosine-3'-phosphate
  modified_base 8: mod_base = OTHER; note = 2'-deoxy-2'-fluoroguanosine-3'-phosphate
  modified_base 9: mod_base = OTHER; note = 2'-O-methylcytidine-3'-phosphate
  modified_base 10: mod_base = OTHER; note = 2'-O-methyladenosine-3'-phosphate
  modified_base 11: mod_base = OTHER; note = 2'-O-methyladenosine-3'-phosphate
  modified_base 12: mod_base = OTHER; note = 2'-deoxy-2'-fluoroguanosine-3'-phosphate
  modified_base 13: mod_base = OTHER; note = 2'-O-methyladenosine-3'-phosphate
  modified_base 14: mod_base = OTHER; note = 2'-deoxy-2'-fluoroadenosine-3'-phosphate
  modified_base 15: mod_base = OTHER; note = 2'-O-methylcytidine-3'-phosphate
  modified_base 16: mod_base = OTHER; note = 2'-deoxy-2'-fluoroadenosine-3'-phosphate
  modified_base 17: mod_base = OTHER; note = 2'-O-methylcytidine-3'-phosphate
  modified_base 18: mod_base = OTHER; note = 2'-deoxy-2'-fluorouridine-3'-phosphate
  modified_base 19: mod_base = OTHER; note = 2'-O-methylguanosine-3'-phosphate
  modified_base 20: mod_base = OTHER; note = 2'-deoxy-2'-fluorouridine-3'-phosphate
  modified_base 21: mod_base = OTHER; note = 2'-O-methyluridine-3'-phosphorothioate
  modified_base 22: mod_base = OTHER; note = 2'-deoxy-2'-fluorouridine-3'-phosphorothioate
  modified_base 23: mod_base = OTHER; note = 2'-O-methyluridine
ttatagagcaagaacactgtttt

SEQ ID NO: 682 - RNA, 23 nt, synthetic construct
  source 1..23: mol_type = other RNA
  modified_base 1: mod_base = OTHER; note = 2'-O-methyluridine-3'-phosphate
  modified_base 2: mod_base = OTHER; note = 2'-deoxy-2'-fluorouridine-3'-phosphate
  modified_base 3: mod_base = OTHER; note = 2'-O-methyladenosine-3'-phosphate
  modified_base 4: mod_base = OTHER; note = 2'-deoxy-2'-fluorouridine-3'-phosphate
  modified_base 5: mod_base = OTHER; note = 2'-O-methyladenosine-3'-phosphate
  modified_base 6: mod_base = OTHER; note = 2'-O-methylguanosine-3'-phosphate
  modified_base 7: mod_base = OTHER; note = 2'-O-methyladenosine-3'-phosphate
  modified_base 8: mod_base = OTHER; note = 2'-deoxy-2'-fluoroguanosine-3'-phosphate
  modified_base 9: mod_base = OTHER; note = 2'-O-methylcytidine-3'-phosphate
  modified_base 10: mod_base = OTHER; note = 2'-deoxy-2'-fluoroadenosine-3'-phosphate
  modified_base 11: mod_base = OTHER; note = 2'-O-methyladenosine-3'-phosphate
  modified_base 12: mod_base = OTHER; note = 2'-deoxy-2'-fluoroguanosine-3'-phosphate
  modified_base 13: mod_base = OTHER; note = 2'-O-methyladenosine-3'-phosphate
  modified_base 14: mod_base = OTHER; note = 2'-deoxy-2'-fluoroadenosine-3'-phosphate
  modified_base 15: mod_base = OTHER; note = 2'-O-methylcytidine-3'-phosphate
  modified_base 16: mod_base = OTHER; note = 2'-deoxy-2'-fluoroadenosine-3'-phosphate
  modified_base 17: mod_base = OTHER; note = 2'-O-methylcytidine-3'-phosphate
  modified_base 18: mod_base = OTHER; note = 2'-deoxy-2'-fluorouridine-3'-phosphate
  modified_base 19: mod_base = OTHER; note = 2'-O-methylguanosine-3'-phosphate
  modified_base 20: mod_base = OTHER; note = 2'-deoxy-2'-fluorouridine-3'-phosphate
  modified_base 21: mod_base = OTHER; note = 2'-O-methyluridine-3'-phosphorothioate
  modified_base 22: mod_base = OTHER; note = 2'-deoxy-2'-fluorouridine-3'-phosphorothioate
  modified_base 23: mod_base = OTHER; note = 2'-deoxy-2'-fluorouridine
ttatagagcaagaacactgtttt

SEQ ID NO: 683 - RNA, 23 nt, synthetic construct
  source 1..23: mol_type = other RNA
  modified_base 1: mod_base = OTHER; note = 2'-O-methyluridine-3'-phosphate
  modified_base 2: mod_base = OTHER; note = 2'-deoxy-2'-fluorouridine-3'-phosphate
  modified_base 3: mod_base = OTHER; note = 2'-O-methyladenosine-3'-phosphate
  modified_base 4: mod_base = OTHER; note = 2'-deoxy-2'-fluorouridine-3'-phosphate
  modified_base 5: mod_base = OTHER; note = 2'-O-methyladenosine-3'-phosphate
  modified_base 6: mod_base = OTHER; note = 2'-deoxy-2'-fluoroguanosine-3'-phosphate
  modified_base 7: mod_base = OTHER; note = 2'-O-methyladenosine-3'-phosphate
  modified_base 8: mod_base = OTHER; note = 2'-deoxy-2'-fluoroguanosine-3'-phosphate
  modified_base 9: mod_base = OTHER; note = 2'-O-methylcytidine-3'-phosphate
  modified_base 10: mod_base = OTHER; note = 2'-deoxy-2'-fluoroadenosine-3'-phosphate
  modified_base 11: mod_base = OTHER; note = 2'-O-methyladenosine-3'-phosphate
  modified_base 12: mod_base = OTHER; note = 2'-O-methylguanosine-3'-phosphate
  modified_base 13: mod_base = OTHER; note = 2'-O-methyladenosine-3'-phosphate
  modified_base 14: mod_base = OTHER; note = 2'-deoxy-2'-fluoroadenosine-3'-phosphate
  modified_base 15: mod_base = OTHER; note = 2'-O-methylcytidine-3'-phosphate
  modified_base 16: mod_base = OTHER; note = 2'-deoxy-2'-fluoroadenosine-3'-phosphate
  modified_base 17: mod_base = OTHER; note = 2'-deoxy-2'-fluorocytidine-3'-phosphate
  modified_base 18: mod_base = OTHER; note = 2'-deoxy-2'-fluorouridine-3'-phosphate
  modified_base 19: mod_base = OTHER; note = 2'-O-methylguanosine-3'-phosphate
  modified_base 20: mod_base = OTHER; note = 2'-deoxy-2'-fluorouridine-3'-phosphate
  modified_base 21: mod_base = OTHER; note = 2'-O-methyluridine-3'-phosphorothioate
  modified_base 22: mod_base = OTHER; note = 2'-deoxy-2'-fluorouridine-3'-phosphorothioate
  modified_base 23: mod_base = OTHER; note = 2'-O-methyluridine
ttatagagcaagaacactgtttt

SEQ ID NO: 684 - RNA, 23 nt, synthetic construct
  source 1..23: mol_type = other RNA
  modified_base 1: mod_base = OTHER; note = 2'-O-methyluridine-3'-phosphate
  modified_base 2: mod_base = OTHER; note = 2'-deoxy-2'-fluorouridine-3'-phosphate
  modified_base 3: mod_base = OTHER; note = 2'-O-methyladenosine-3'-phosphate
  modified_base 4: mod_base = OTHER; note = 2'-deoxy-2'-fluorouridine-3'-phosphate
  modified_base 5: mod_base = OTHER; note = 2'-O-methyladenosine-3'-phosphate
  modified_base 6: mod_base = OTHER; note = 2'-deoxy-2'-fluoroguanosine-3'-phosphate
  modified_base 7: mod_base = OTHER; note = 2'-deoxy-2'-fluoroadenosine-3'-phosphate
  modified_base 8: mod_base = OTHER; note = 2'-deoxy-2'-fluoroguanosine-3'-phosphate
  modified_base 9: mod_base = OTHER; note = 2'-O-methylcytidine-3'-phosphate
  modified_base 10: mod_base = OTHER; note = 2'-deoxy-2'-fluoroadenosine-3'-phosphate
  modified_base 11: mod_base = OTHER; note = 2'-O-methyladenosine-3'-phosphate
  modified_base 12: mod_base = OTHER; note = 2'-deoxy-2'-fluoroguanosine-3'-phosphate
  modified_base 13: mod_base = OTHER; note = 2'-O-methyladenosine-3'-phosphate
  modified_base 14: mod_base = OTHER; note = 2'-deoxy-2'-fluoroadenosine-3'-phosphate
  modified_base 15: mod_base = OTHER; note = 2'-O-methylcytidine-3'-phosphate
  modified_base 16: mod_base = OTHER; note = 2'-deoxy-2'-fluoroadenosine-3'-phosphate
  modified_base 17: mod_base = OTHER; note = 2'-O-methylcytidine-3'-phosphate
  modified_base 18: mod_base = OTHER; note = 2'-O-methyluridine-3'-phosphate
  modified_base 19: mod_base = OTHER; note = 2'-O-methylguanosine-3'-phosphate
  modified_base 20: mod_base = OTHER; note = 2'-deoxy-2'-fluorouridine-3'-phosphate
  modified_base 21: mod_base = OTHER; note = 2'-O-methyluridine-3'-phosphorothioate
  modified_base 22: mod_base = OTHER; note = 2'-deoxy-2'-fluorouridine-3'-phosphorothioate
  modified_base 23: mod_base = OTHER; note = 2'-O-methyluridine
ttatagagcaagaacactgtttt

SEQ ID NO: 685 - RNA, 23 nt, synthetic construct
  source 1..23: mol_type = other RNA
  modified_base 1: mod_base = OTHER; note = 2'-O-methyluridine-3'-phosphate
  modified_base 2: mod_base = OTHER; note = 2'-deoxy-2'-fluorouridine-3'-phosphate
  modified_base 3: mod_base = OTHER; note = 2'-O-methyladenosine-3'-phosphate
  modified_base 4: mod_base = OTHER; note = 2'-deoxy-2'-fluorouridine-3'-phosphate
  modified_base 5: mod_base = OTHER; note = 2'-O-methyladenosine-3'-phosphate
  modified_base 6: mod_base = OTHER; note = 2'-deoxy-2'-fluoroguanosine-3'-phosphate
  modified_base 7: mod_base = OTHER; note = 2'-O-methyladenosine-3'-phosphate
  modified_base 8: mod_base = OTHER; note = 2'-deoxy-2'-fluoroguanosine-3'-phosphate
  modified_base 9: mod_base = OTHER; note = 2'-O-methylcytidine-3'-phosphate
  modified_base 10: mod_base = OTHER; note = 2'-deoxy-2'-fluoroadenosine-3'-phosphate
  modified_base 11: mod_base = OTHER; note = 2'-O-methyladenosine-3'-phosphate
  modified_base 12: mod_base = OTHER; note = 2'-O-methylguanosine-3'-phosphate
  modified_base 13: mod_base = OTHER; note = 2'-O-methyladenosine-3'-phosphate
  modified_base 14: mod_base = OTHER; note = 2'-deoxy-2'-fluoroadenosine-3'-phosphate
  modified_base 15: mod_base = OTHER; note = 2'-O-methylcytidine-3'-phosphate
  modified_base 16: mod_base = OTHER; note = 2'-deoxy-2'-fluoroadenosine-3'-phosphate
  modified_base 17: mod_base = OTHER; note = 2'-O-methylcytidine-3'-phosphate
  modified_base 18: mod_base = OTHER; note = 2'-deoxy-2'-fluorouridine-3'-phosphate
  modified_base 19: mod_base = OTHER; note = 2'-deoxy-2'-fluoroguanosine-3'-phosphate
  modified_base 20: mod_base = OTHER; note = 2'-deoxy-2'-fluorouridine-3'-phosphate
  modified_base 21: mod_base = OTHER; note = 2'-O-methyluridine-3'-phosphorothioate
  modified_base 22: mod_base = OTHER; note = 2'-deoxy-2'-fluorouridine-3'-phosphorothioate
  modified_base 23: mod_base = OTHER; note = 2'-O-methyluridine
ttatagagcaagaacactgtttt

SEQ ID NO: 686 - RNA, 23 nt, synthetic construct
  source 1..23: mol_type = other RNA
  modified_base 1: mod_base = OTHER; note = 2'-O-methyluridine-3'-phosphate
  modified_base 2: mod_base = OTHER; note = 2'-deoxy-2'-fluorouridine-3'-phosphate
  modified_base 3: mod_base = OTHER; note = 2'-O-methyladenosine-3'-phosphate
  modified_base 4: mod_base = OTHER; note = 2'-deoxy-2'-fluorouridine-3'-phosphate
  modified_base 5: mod_base = OTHER; note = 2'-O-methyladenosine-3'-phosphate
  modified_base 6: mod_base = OTHER; note = 2'-O-methylguanosine-3'-phosphate
  modified_base 7: mod_base = OTHER; note = 2'-O-methyladenosine-3'-phosphate
  modified_base 8: mod_base = OTHER; note = 2'-deoxy-2'-fluoroguanosine-3'-phosphate
  modified_base 9: mod_base = OTHER; note = 2'-O-methylcytidine-3'-phosphate
  modified_base 10: mod_base = OTHER; note = 2'-deoxy-2'-fluoroadenosine-3'-phosphate
  modified_base 11: mod_base = OTHER; note = 2'-O-methyladenosine-3'-phosphate
  modified_base 12: mod_base = OTHER; note = 2'-deoxy-2'-fluoroguanosine-3'-phosphate
  modified_base 13: mod_base = OTHER; note = 2'-O-methyladenosine-3'-phosphate
  modified_base 14: mod_base = OTHER; note = 2'-deoxy-2'-fluoroadenosine-3'-phosphate
  modified_base 15: mod_base = OTHER; note = 2'-O-methylcytidine-3'-phosphate
  modified_base 16: mod_base = OTHER; note = 2'-deoxy-2'-fluoroadenosine-3'-phosphate
  modified_base 17: mod_base = OTHER; note = 2'-O-methylcytidine-3'-phosphate
  modified_base 18: mod_base = OTHER; note = 2'-deoxy-2'-fluorouridine-3'-phosphate
  modified_base 19: mod_base = OTHER; note = 2'-deoxy-2'-fluoroguanosine-3'-phosphate
  modified_base 20: mod_base = OTHER; note = 2'-deoxy-2'-fluorouridine-3'-phosphate
  modified_base 21: mod_base = OTHER; note = 2'-O-methyluridine-3'-phosphorothioate
  modified_base 22: mod_base = OTHER; note = 2'-deoxy-2'-fluorouridine-3'-phosphorothioate
  modified_base 23: mod_base = OTHER; note = 2'-O-methyluridine
ttatagagcaagaacactgtttt

SEQ ID NO: 687 - RNA, 23 nt, synthetic construct
  source 1..23: mol_type = other RNA
  modified_base 1: mod_base = OTHER; note = 2'-O-methyluridine-3'-phosphate
  modified_base 2: mod_base = OTHER; note = 2'-deoxy-2'-fluorouridine-3'-phosphate
  modified_base 3: mod_base = OTHER; note = 2'-O-methyladenosine-3'-phosphate
  modified_base 4: mod_base = OTHER; note = 2'-deoxy-2'-fluorouridine-3'-phosphate
  modified_base 5: mod_base = OTHER; note = 2'-O-methyladenosine-3'-phosphate
  modified_base 6: mod_base = OTHER; note = 2'-deoxy-2'-fluoroguanosine-3'-phosphate
  modified_base 7: mod_base = OTHER; note = 2'-deoxy-2'-fluoroadenosine-3'-phosphate
  modified_base 8: mod_base = OTHER; note = 2'-deoxy-2'-fluoroguanosine-3'-phosphate
  modified_base 9: mod_base = OTHER; note = 2'-O-methylcytidine-3'-phosphate
  modified_base 10: mod_base = OTHER; note = 2'-deoxy-2'-fluoroadenosine-3'-phosphate
  modified_base 11: mod_base = OTHER; note = 2'-O-methyladenosine-3'-phosphate
  modified_base 12: mod_base = OTHER; note = 2'-deoxy-2'-fluoroguanosine-3'-phosphate
  modified_base 13: mod_base = OTHER; note = 2'-O-methyladenosine-3'-phosphate
  modified_base 14: mod_base = OTHER; note = 2'-deoxy-2'-fluoroadenosine-3'-phosphate
  modified_base 15: mod_base = OTHER; note = 2'-O-methylcytidine-3'-phosphate
  modified_base 16: mod_base = OTHER; note = 2'-deoxy-2'-fluoroadenosine-3'-phosphate
  modified_base 17: mod_base = OTHER; note = 2'-O-methylcytidine-3'-phosphate
  modified_base 18: mod_base = OTHER; note = 2'-deoxy-2'-fluorouridine-3'-phosphate
  modified_base 19: mod_base = OTHER; note = 2'-O-methylguanosine-3'-phosphate
  modified_base 20: mod_base = OTHER; note = 2'-deoxy-2'-fluorouridine-3'-phosphate
  modified_base 21: mod_base = OTHER; note = 2'-O-methyluridine-3'-phosphorothioate
  modified_base 22: mod_base = OTHER; note = 2'-deoxy-2'-fluorouridine-3'-phosphorothioate
  modified_base 23: mod_base = OTHER; note = 2'-O-methyluridine
ttatagagcaagaacactgtttt

SEQ ID NO: 688 - DNA, 21 bp, synthetic construct
  source 1..21: mol_type = other DNA
  modified_base 1: mod_base = OTHER; note = uridine-3'-phosphate
  modified_base 2: mod_base = OTHER; note = 2'-O-methyluridine-3'-phosphate
  modified_base 3: mod_base = OTHER; note = adenosine-3'-phosphate
  modified_base 4: mod_base = OTHER; note = 2'-O-methyluridine-3'-phosphate
  modified_base 5: mod_base = OTHER; note = adenosine-3'-phosphate
  modified_base 6: mod_base = OTHER; note = guanosine-3'-phosphate
  modified_base 7: mod_base = OTHER; note = adenosine-3'-phosphate
  modified_base 8: mod_base = OTHER; note = guanosine-3'-phosphate
  modified_base 9: mod_base = OTHER; note = 2'-O-methylcytidine-3'-phosphate
  modified_base 10: mod_base = OTHER; note = adenosine-3'-phosphate
  modified_base 11: mod_base = OTHER; note = adenosine-3'-phosphate
  modified_base 12: mod_base = OTHER; note = guanosine-3'-phosphate
  modified_base 13: mod_base = OTHER; note = adenosine-3'-phosphate
  modified_base 14: mod_base = OTHER; note = adenosine-3'-phosphate
  modified_base 15: mod_base = OTHER; note = 2'-O-methylcytidine-3'-phosphate
  modified_base 16: mod_base = OTHER; note = adenosine-3'-phosphate
  modified_base 17: mod_base = OTHER; note = cytidine-3'-phosphate
  modified_base 18: mod_base = OTHER; note = uridine-3'-phosphate
  modified_base 19: mod_base = OTHER; note = guanosine-3'-phosphate
  misc_feature 1..19: note = RNA
  misc_feature 20..21: note = DNA
ttatagagcaagaacactgtt

SEQ ID NO: 689 - RNA, 23 nt, synthetic construct
  source 1..23: mol_type = other RNA
  modified_base 1: mod_base = OTHER; note = 2'-O-methyluridine-3'-phosphate
  modified_base 2: mod_base = OTHER; note = 2'-deoxy-2'-fluorouridine-3'-phosphate
  modified_base 3: mod_base = OTHER; note = 2'-deoxy-2'-fluoroadenosine-3'-phosphate
  modified_base 4: mod_base = OTHER; note = 2'-deoxy-2'-fluorouridine-3'-phosphate
  modified_base 5: mod_base = OTHER; note = 2'-O-methyladenosine-3'-phosphate
  modified_base 6: mod_base = OTHER; note = 2'-deoxy-2'-fluoroguanosine-3'-phosphate
  modified_base 7: mod_base = OTHER; note = 2'-O-methyladenosine-3'-phosphate
  modified_base 8: mod_base = OTHER; note = 2'-O-methylguanosine-3'-phosphate
  modified_base 9: mod_base = OTHER; note = 2'-O-methylcytidine-3'-phosphate
  modified_base 10: mod_base = OTHER; note = 2'-deoxy-2'-fluoroadenosine-3'-phosphate
  modified_base 11: mod_base = OTHER; note = 2'-O-methyladenosine-3'-phosphate
  modified_base 12: mod_base = OTHER; note = 2'-deoxy-2'-fluoroguanosine-3'-phosphate
  modified_base 13: mod_base = OTHER; note = 2'-O-methyladenosine-3'-phosphate
  modified_base 14: mod_base = OTHER; note = 2'-deoxy-2'-fluoroadenosine-3'-phosphate
  modified_base 15: mod_base = OTHER; note = 2'-O-methylcytidine-3'-phosphate
  modified_base 16: mod_base = OTHER; note = 2'-deoxy-2'-fluoroadenosine-3'-phosphate
  modified_base 17: mod_base = OTHER; note = 2'-O-methylcytidine-3'-phosphate
  modified_base 18: mod_base = OTHER; note = 2'-deoxy-2'-fluorouridine-3'-phosphate
  modified_base 19: mod_base = OTHER; note = 2'-O-methylguanosine-3'-phosphate
  modified_base 20: mod_base = OTHER; note = 2'-deoxy-2'-fluorouridine-3'-phosphate
  modified_base 21: mod_base = OTHER; note = 2'-O-methyluridine-3'-phosphorothioate
  modified_base 22: mod_base = OTHER; note = 2'-deoxy-2'-fluorouridine-3'-phosphorothioate
  modified_base 23: mod_base = OTHER; note = 2'-O-methyluridine
ttatagagcaagaacactgtttt

SEQ ID NO: 690 - RNA, 23 nt, synthetic construct
  source 1..23: mol_type = other RNA
  modified_base 1: mod_base = OTHER; note = 2'-O-methyluridine-3'-phosphate
  modified_base 2: mod_base = OTHER; note = 2'-deoxy-2'-fluorouridine-3'-phosphate
  modified_base 3: mod_base = OTHER; note = 2'-O-methyladenosine-3'-phosphate
  modified_base 4: mod_base = OTHER; note = 2'-deoxy-2'-fluorouridine-3'-phosphate
  modified_base 5: mod_base = OTHER; note = 2'-O-methyladenosine-3'-phosphate
  modified_base 6: mod_base = OTHER; note = 2'-deoxy-2'-fluoroguanosine-3'-phosphate
  modified_base 7: mod_base = OTHER; note = 2'-O-methyladenosine-3'-phosphate
  modified_base 8: mod_base = OTHER; note = 2'-deoxy-2'-fluoroguanosine-3'-phosphate
  modified_base 9: mod_base = OTHER; note = 2'-O-methylcytidine-3'-phosphate
  modified_base 10: mod_base = OTHER; note = 2'-deoxy-2'-fluoroadenosine-3'-phosphate
  modified_base 11: mod_base = OTHER; note = 2'-O-methyladenosine-3'-phosphate
  modified_base 12: mod_base = OTHER; note = 2'-O-methylguanosine-3'-phosphate
  modified_base 13: mod_base = OTHER; note = 2'-O-methyladenosine-3'-phosphate
  modified_base 14: mod_base = OTHER; note = 2'-deoxy-2'-fluoroadenosine-3'-phosphate
  modified_base 15: mod_base = OTHER; note = 2'-deoxy-2'-fluorocytidine-3'-phosphate
  modified_base 16: mod_base = OTHER; note = 2'-deoxy-2'-fluoroadenosine-3'-phosphate
  modified_base 17: mod_base = OTHER; note = 2'-O-methylcytidine-3'-phosphate
  modified_base 18: mod_base = OTHER; note = 2'-deoxy-2'-fluorouridine-3'-phosphate
  modified_base 19: mod_base = OTHER; note = 2'-O-methylguanosine-3'-phosphate
  modified_base 20: mod_base = OTHER; note = 2'-deoxy-2'-fluorouridine-3'-phosphate
  modified_base 21: mod_base = OTHER; note = 2'-O-methyluridine-3'-phosphorothioate
  modified_base 22: mod_base = OTHER; note = 2'-deoxy-2'-fluorouridine-3'-phosphorothioate
  modified_base 23: mod_base = OTHER; note = 2'-O-methyluridine
ttatagagcaagaacactgtttt

SEQ ID NO: 691 - RNA, 23 nt, synthetic construct
  source 1..23: mol_type = other RNA
  modified_base 1: mod_base = OTHER; note = 2'-O-methyluridine-3'-phosphate
  modified_base 2: mod_base = OTHER; note = 2'-deoxy-2'-fluorouridine-3'-phosphate
  modified_base 3: mod_base = OTHER; note = 2'-O-methyladenosine-3'-phosphate
  modified_base 4: mod_base = OTHER; note = 2'-O-methyluridine-3'-phosphate
  modified_base 5: mod_base = OTHER; note = 2'-O-methyladenosine-3'-phosphate
  modified_base 6: mod_base = OTHER; note = 2'-deoxy-2'-fluoroguanosine-3'-phosphate
  modified_base 7: mod_base = OTHER; note = 2'-O-methyladenosine-3'-phosphate
  modified_base 8: mod_base = OTHER; note = 2'-deoxy-2'-fluoroguanosine-3'-phosphate
  modified_base 9: mod_base = OTHER; note = 2'-O-methylcytidine-3'-phosphate
  modified_base 10: mod_base = OTHER; note = 2'-deoxy-2'-fluoroadenosine-3'-phosphate
  modified_base 11: mod_base = OTHER; note = 2'-O-methyladenosine-3'-phosphate
  modified_base 12: mod_base = OTHER; note = 2'-deoxy-2'-fluoroguanosine-3'-phosphate
  modified_base 13: mod_base = OTHER; note = 2'-O-methyladenosine-3'-phosphate
  modified_base 14: mod_base = OTHER; note = 2'-deoxy-2'-fluoroadenosine-3'-phosphate
  modified_base 15: mod_base = OTHER; note = 2'-O-methylcytidine-3'-phosphate
  modified_base 16: mod_base = OTHER; note = 2'-deoxy-2'-fluoroadenosine-3'-phosphate
  modified_base 17: mod_base = OTHER; note = 2'-O-methylcytidine-3'-phosphate
  modified_base 18: mod_base = OTHER; note = 2'-deoxy-2'-fluorouridine-3'-phosphate
  modified_base 19: mod_base = OTHER; note = 2'-deoxy-2'-fluoroguanosine-3'-phosphate
  modified_base 20: mod_base = OTHER; note = 2'-deoxy-2'-fluorouridine-3'-phosphate
  modified_base 21: mod_base = OTHER; note = 2'-O-methyluridine-3'-phosphorothioate
  modified_base 22: mod_base = OTHER; note = 2'-deoxy-2'-fluorouridine-3'-phosphorothioate
  modified_base 23: mod_base = OTHER; note = 2'-O-methyluridine
ttatagagcaagaacactgtttt

SEQ ID NO: 692 - DNA, 23 bp, synthetic construct
  source 1..23: mol_type = other DNA
  modified_base 2: mod_base = OTHER; note = 2'-O-methyluridine-3'-phosphate
  modified_base 4: mod_base = OTHER; note = 2'-O-methyluridine-3'-phosphate
  modified_base 6: mod_base = OTHER; note = 2'-O-methylguanosine-3'-phosphate
  modified_base 8: mod_base = OTHER; note = 2'-deoxy-2'-fluoroguanosine-3'-phosphate
  modified_base 9: mod_base = OTHER; note = 2'-O-methylcytidine-3'-phosphate
  modified_base 10: mod_base = OTHER; note = 2'-deoxy-2'-fluoroadenosine-3'-phosphate
  modified_base 11: mod_base = OTHER; note = 2'-O-methyladenosine-3'-phosphate
  modified_base 12: mod_base = OTHER; note = 2'-deoxy-2'-fluoroguanosine-3'-phosphate
  modified_base 13: mod_base = OTHER; note = 2'-O-methyladenosine-3'-phosphate
  modified_base 14: mod_base = OTHER; note = 2'-deoxy-2'-fluoroadenosine-3'-phosphate
  modified_base 15: mod_base = OTHER; note = 2'-O-methylcytidine-3'-phosphate
  modified_base 16: mod_base = OTHER; note = 2'-deoxy-2'-fluoroadenosine-3'-phosphate
  modified_base 17: mod_base = OTHER; note = 2'-O-methylcytidine-3'-phosphate
  modified_base 18: mod_base = OTHER; note = 2'-deoxy-2'-fluoroadenosine-3'-phosphate
  modified_base 19: mod_base = OTHER; note = 2'-O-methylguanosine-3'-phosphate
  modified_base 20: mod_base = OTHER; note = 2'-deoxy-2'-fluorouridine-3'-phosphate
  modified_base 21: mod_base = OTHER; note = 2'-O-methyluridine-3'-phosphorothioate
  modified_base 22: mod_base = OTHER; note = 2'-deoxy-2'-fluorouridine-3'-phosphorothioate
  modified_base 23: mod_base = OTHER; note = 2'-O-methyluridine
  misc_feature 2: note = RNA
  misc_feature 4: note = RNA
  misc_feature 6: note = RNA
  misc_feature 8..23: note = RNA
  misc_feature 1: note = DNA
  misc_feature 5: note = DNA
  misc_feature 7: note = DNA
ttatagagcaagaacacagtttt

SEQ ID NO: 693 - RNA, 23 nt, synthetic construct
  source 1..23: mol_type = other RNA
  modified_base 1: mod_base = OTHER; note = 2'-O-methyluridine-3'-phosphate
  modified_base 2: mod_base = OTHER; note = 2'-deoxy-2'-fluorouridine-3'-phosphate
  modified_base 3: mod_base = OTHER; note = 2'-O-methyladenosine-3'-phosphate
  modified_base 4: mod_base = OTHER; note = 2'-deoxy-2'-fluorouridine-3'-phosphate
  modified_base 5: mod_base = OTHER; note = 2'-O-methyladenosine-3'-phosphate
  modified_base 6: mod_base = OTHER; note = 2'-deoxy-2'-fluoroguanosine-3'-phosphate
  modified_base 7: mod_base = OTHER; note = 2'-deoxy-2'-fluoroadenosine-3'-phosphate
  modified_base 8: mod_base = OTHER; note = 2'-deoxy-2'-fluoroguanosine-3'-phosphate
  modified_base 9: mod_base = OTHER; note = 2'-O-methylcytidine-3'-phosphate
  modified_base 10: mod_base = OTHER; note = 2'-deoxy-2'-fluoroadenosine-3'-phosphate
  modified_base 11: mod_base = OTHER; note = 2'-O-methyladenosine-3'-phosphate
  modified_base 12: mod_base = OTHER; note = 2'-O-methylguanosine-3'-phosphate
  modified_base 13: mod_base = OTHER; note = 2'-O-methyladenosine-3'-phosphate
  modified_base 14: mod_base = OTHER; note = 2'-deoxy-2'-fluoroadenosine-3'-phosphate
  modified_base 15: mod_base = OTHER; note = 2'-O-methylcytidine-3'-phosphate
  modified_base 16: mod_base = OTHER; note = 2'-deoxy-2'-fluoroadenosine-3'-phosphate
  modified_base 17: mod_base = OTHER; note = 2'-O-methylcytidine-3'-phosphate
  modified_base 18: mod_base = OTHER; note = 2'-deoxy-2'-fluorouridine-3'-phosphate
  modified_base 19: mod_base = OTHER; note = 2'-O-methylguanosine-3'-phosphate
  modified_base 20: mod_base = OTHER; note = 2'-deoxy-2'-fluorouridine-3'-phosphate
  modified_base 21: mod_base = OTHER; note = 2'-O-methyluridine-3'-phosphorothioate
  modified_base 22: mod_base = OTHER; note = 2'-deoxy-2'-fluorouridine-3'-phosphorothioate
  modified_base 23: mod_base = OTHER; note = 2'-O-methyluridine
ttatagagcaagaacactgtttt

SEQ ID NO: 694 - DNA, 21 bp, synthetic construct
  source 1..21: mol_type = other DNA
  modified_base 1: mod_base = OTHER; note = uridine-3'-phosphate
  modified_base 2: mod_base = OTHER; note = 2'-O-methyluridine-3'-phosphate
  modified_base 3: mod_base = OTHER; note = adenosine-3'-phosphate
  modified_base 4: mod_base = OTHER; note = 2'-O-methyluridine-3'-phosphate
  modified_base 5: mod_base = OTHER; note = adenosine-3'-phosphate
  modified_base 6: mod_base = OTHER; note = guanosine-3'-phosphate
  modified_base 7: mod_base = OTHER; note = adenosine-3'-phosphate
  modified_base 8: mod_base = OTHER; note = guanosine-3'-phosphate
  modified_base 9: mod_base = OTHER; note = 2'-O-methylcytidine-3'-phosphate
  modified_base 10: mod_base = OTHER; note = adenosine-3'-phosphate
  modified_base 11: mod_base = OTHER; note = adenosine-3'-phosphate
  modified_base 12: mod_base = OTHER; note = guanosine-3'-phosphate
  modified_base 13: mod_base = OTHER; note = adenosine-3'-phosphate
  modified_base 14: mod_base = OTHER; note = adenosine-3'-phosphate
  modified_base 15: mod_base = OTHER; note = 2'-O-methylcytidine-3'-phosphate
  modified_base 16: mod_base = OTHER; note = adenosine-3'-phosphate
  modified_base 17: mod_base = OTHER; note = cytidine-3'-phosphate
  modified_base 18: mod_base = OTHER; note = uridine-3'-phosphate
  modified_base 19: mod_base = OTHER; note = guanosine-3'-phosphate
  misc_feature 1..19: note = RNA
  misc_feature 20..21: note = DNA
ttatagagcaagaacactgtt

SEQ ID NO: 695 - RNA, 23 nt, synthetic construct
  source 1..23: mol_type = other RNA
  modified_base 1: mod_base = OTHER; note = 2'-O-methyluridine-3'-phosphate
  modified_base 2: mod_base = OTHER; note = 2'-deoxy-2'-fluorouridine-3'-phosphate
  modified_base 3: mod_base = OTHER; note = 2'-O-methyladenosine-3'-phosphate
  modified_base 4: mod_base = OTHER; note = 2'-deoxy-2'-fluorouridine-3'-phosphate
  modified_base 5: mod_base = OTHER; note = 2'-O-methyladenosine-3'-phosphate
  modified_base 6: mod_base = OTHER; note = 2'-O-methylguanosine-3'-phosphate
  modified_base 7: mod_base = OTHER; note = 2'-O-methyladenosine-3'-phosphate
  modified_base 8: mod_base = OTHER; note = 2'-deoxy-2'-fluoroguanosine-3'-phosphate
  modified_base 9: mod_base = OTHER; note = 2'-O-methylcytidine-3'-phosphate
  modified_base 10: mod_base = OTHER; note = 2'-deoxy-2'-fluoroadenosine-3'-phosphate
  modified_base 11: mod_base = OTHER; note = 2'-O-methyladenosine-3'-phosphate
  modified_base 12: mod_base = OTHER; note = 2'-deoxy-2'-fluoroguanosine-3'-phosphate
  modified_base 13: mod_base = OTHER; note = 2'-O-methyladenosine-3'-phosphate
  modified_base 14: mod_base = OTHER; note = 2'-deoxy-2'-fluoroadenosine-3'-phosphate
  modified_base 15: mod_base = OTHER; note = 2'-O-methylcytidine-3'-phosphate
  modified_base 16: mod_base = OTHER; note = 2'-deoxy-2'-fluoroadenosine-3'-phosphate
  modified_base 17: mod_base = OTHER; note = 2'-O-methylcytidine-3'-phosphate
  modified_base 18: mod_base = OTHER; note = 2'-deoxy-2'-fluorouridine-3'-phosphate
  modified_base 19: mod_base = OTHER; note = 2'-O-methylguanosine-3'-phosphate
  modified_base 20: mod_base = OTHER; note = 2'-deoxy-2'-fluorouridine-3'-phosphate
  modified_base 21: mod_base = OTHER; note = 2'-deoxy-2'-fluorouridine-3'-phosphorothioate
  modified_base 22: mod_base = OTHER; note = 2'-deoxy-2'-fluorouridine-3'-phosphorothioate
  modified_base 23: mod_base = OTHER; note = 2'-O-methyluridine
ttatagagcaagaacactgtttt

SEQ ID NO: 696 - RNA, 23 nt, synthetic construct
  source 1..23: mol_type = other RNA
  modified_base 1: mod_base = OTHER; note = 2'-O-methyluridine-3'-phosphate
  modified_base 2: mod_base = OTHER; note = 2'-deoxy-2'-fluorouridine-3'-phosphate
  modified_base 3: mod_base = OTHER; note = 2'-O-methyladenosine-3'-phosphate
  modified_base 4: mod_base = OTHER; note = 2'-deoxy-2'-fluorouridine-3'-phosphate
  modified_base 5: mod_base = OTHER; note = 2'-O-methyladenosine-3'-phosphate
  modified_base 6: mod_base = OTHER; note = 2'-deoxy-2'-fluoroguanosine-3'-phosphate
  modified_base 7: mod_base = OTHER; note = 2'-deoxy-2'-fluoroadenosine-3'-phosphate
  modified_base 8: mod_base = OTHER; note = 2'-deoxy-2'-fluoroguanosine-3'-phosphate
  modified_base 9: mod_base = OTHER; note = 2'-O-methylcytidine-3'-phosphate
  modified_base 10: mod_base = OTHER; note = 2'-deoxy-2'-fluoroadenosine-3'-phosphate
  modified_base 11: mod_base = OTHER; note = 2'-O-methyladenosine-3'-phosphate
  modified_base 12: mod_base = OTHER; note = 2'-deoxy-2'-fluoroguanosine-3'-phosphate
  modified_base 13: mod_base = OTHER; note = 2'-O-methyladenosine-3'-phosphate
  modified_base 14: mod_base = OTHER; note = 2'-deoxy-2'-fluoroadenosine-3'-phosphate
  modified_base 15: mod_base = OTHER; note = 2'-O-methylcytidine-3'-phosphate
  modified_base 16: mod_base = OTHER; note = 2'-O-methyladenosine-3'-phosphate
  modified_base 17: mod_base = OTHER; note = 2'-O-methylcytidine-3'-phosphate
  modified_base 18: mod_base = OTHER; note = 2'-deoxy-2'-fluorouridine-3'-phosphate
  modified_base 19: mod_base = OTHER; note = 2'-O-methylguanosine-3'-phosphate
  modified_base 20: mod_base = OTHER; note = 2'-deoxy-2'-fluorouridine-3'-phosphate
  modified_base 21: mod_base = OTHER; note = 2'-O-methyluridine-3'-phosphorothioate
  modified_base 22: mod_base = OTHER; note = 2'-deoxy-2'-fluorouridine-3'-phosphorothioate
  modified_base 23: mod_base = OTHER; note = 2'-O-methyluridine
ttatagagcaagaacactgtttt

SEQ ID NO: 697 - DNA, 21 bp, synthetic construct
  source 1..21: mol_type = other DNA
  modified_base 1: mod_base = OTHER; note = uridine-3'-phosphate
  modified_base 2: mod_base = OTHER; note = 2'-O-methyluridine-3'-phosphate
  modified_base 3: mod_base = OTHER; note = adenosine-3'-phosphate
  modified_base 4: mod_base = OTHER; note = 2'-O-methyluridine-3'-phosphate
  modified_base 5: mod_base = OTHER; note = adenosine-3'-phosphate
  modified_base 6: mod_base = OTHER; note = guanosine-3'-phosphate
  modified_base 7: mod_base = OTHER; note = adenosine-3'-phosphate
  modified_base 8: mod_base = OTHER; note = guanosine-3'-phosphate
  modified_base 9: mod_base = OTHER; note = 2'-O-methylcytidine-3'-phosphate
  modified_base 10: mod_base = OTHER; note = adenosine-3'-phosphate
  modified_base 11: mod_base = OTHER; note = adenosine-3'-phosphate
  modified_base 12: mod_base = OTHER; note = guanosine-3'-phosphate
  modified_base 13: mod_base = OTHER; note = adenosine-3'-phosphate
  modified_base 14: mod_base = OTHER; note = adenosine-3'-phosphate
  modified_base 15: mod_base = OTHER; note = 2'-O-methylcytidine-3'-phosphate
  modified_base 16: mod_base = OTHER; note = adenosine-3'-phosphate
  modified_base 17: mod_base = OTHER; note = cytidine-3'-phosphate
  modified_base 18: mod_base = OTHER; note = uridine-3'-phosphate
  modified_base 19: mod_base = OTHER; note = guanosine-3'-phosphate
  misc_feature 1..19: note = RNA
  misc_feature 20..21: note = DNA
ttatagagcaagaacactgtt

SEQ ID NO: 698 - RNA, 23 nt, synthetic construct
  source 1..23: mol_type = other RNA
  modified_base 1: mod_base = OTHER; note = 2'-O-methyluridine-3'-phosphate
  modified_base 2: mod_base = OTHER; note = 2'-deoxy-2'-fluorouridine-3'-phosphate
  modified_base 3: mod_base = OTHER; note = 2'-O-methyladenosine-3'-phosphate
  modified_base 4: mod_base = OTHER; note = 2'-deoxy-2'-fluorouridine-3'-phosphate
  modified_base 5: mod_base = OTHER; note = 2'-O-methyladenosine-3'-phosphate
  modified_base 6: mod_base = OTHER; note = 2'-deoxy-2'-fluoroguanosine-3'-phosphate
  modified_base 7: mod_base = OTHER; note = 2'-O-methyladenosine-3'-phosphate
  modified_base 8: mod_base = OTHER; note = 2'-deoxy-2'-fluoroguanosine-3'-phosphate
  modified_base 9: mod_base = OTHER; note = 2'-O-methylcytidine-3'-phosphate
  modified_base 10: mod_base = OTHER; note = 2'-deoxy-2'-fluoroadenosine-3'-phosphate
  modified_base 11: mod_base = OTHER; note = 2'-O-methyladenosine-3'-phosphate
  modified_base 12: mod_base = OTHER; note = 2'-deoxy-2'-fluoroguanosine-3'-phosphate
  modified_base 13: mod_base = OTHER; note = 2'-O-methyladenosine-3'-phosphate
  modified_base 14: mod_base = OTHER; note = 2'-deoxy-2'-fluoroadenosine-3'-phosphate
  modified_base 15: mod_base = OTHER; note = 2'-O-methylcytidine-3'-phosphate
  modified_base 16: mod_base = OTHER; note = 2'-O-methyladenosine-3'-phosphate
  modified_base 17: mod_base = OTHER; note = 2'-O-methylcytidine-3'-phosphate
  modified_base 18: mod_base = OTHER; note = 2'-deoxy-2'-fluorouridine-3'-phosphate
  modified_base 19: mod_base = OTHER; note = 2'-O-methylguanosine-3'-phosphate
  modified_base 20: mod_base = OTHER; note = 2'-deoxy-2'-fluorouridine-3'-phosphate
  modified_base 21: mod_base = OTHER; note = 2'-O-methyluridine-3'-phosphorothioate
  modified_base 22: mod_base = OTHER; note = 2'-deoxy-2'-fluorouridine-3'-phosphorothioate
  modified_base 23: mod_base = OTHER; note = 2'-deoxy-2'-fluorouridine
ttatagagcaagaacactgtttt

SEQ ID NO: 699 - RNA, 23 nt, synthetic construct
  source 1..23: mol_type = other RNA
  modified_base 1: mod_base = OTHER; note = 2'-O-methyluridine-3'-phosphate
  modified_base 2: mod_base = OTHER; note = 2'-deoxy-2'-fluorouridine-3'-phosphate
  modified_base 3: mod_base = OTHER; note = 2'-O-methyladenosine-3'-phosphate
  modified_base 4: mod_base = OTHER; note = 2'-deoxy-2'-fluorouridine-3'-phosphate
  modified_base 5: mod_base = OTHER; note = 2'-deoxy-2'-fluoroadenosine-3'-phosphate
  modified_base 6: mod_base = OTHER; note = 2'-deoxy-2'-fluoroguanosine-3'-phosphate
  modified_base 7: mod_base = OTHER; note = 2'-O-methyladenosine-3'-phosphate
  modified_base 8: mod_base = OTHER; note = 2'-deoxy-2'-fluoroguanosine-3'-phosphate
  modified_base 9: mod_base = OTHER; note = 2'-O-methylcytidine-3'-phosphate
  modified_base 10: mod_base = OTHER; note = 2'-deoxy-2'-fluoroadenosine-3'-phosphate
  modified_base 11: mod_base = OTHER; note = 2'-O-methyladenosine-3'-phosphate
  modified_base 12: mod_base = OTHER; note = 2'-O-methylguanosine-3'-phosphate
  modified_base 13: mod_base = OTHER; note = 2'-O-methyladenosine-3'-phosphate
  modified_base 14: mod_base = OTHER; note = 2'-deoxy-2'-fluoroadenosine-3'-phosphate
  modified_base 15: mod_base = OTHER; note = 2'-O-methylcytidine-3'-phosphate
  modified_base 16: mod_base = OTHER; note = 2'-deoxy-2'-fluoroadenosine-3'-phosphate
  modified_base 17: mod_base = OTHER; note = 2'-O-methylcytidine-3'-phosphate
  modified_base 18: mod_base = OTHER; note = 2'-deoxy-2'-fluorouridine-3'-phosphate
  modified_base 19: mod_base = OTHER; note = 2'-O-methylguanosine-3'-phosphate
  modified_base 20: mod_base = OTHER; note = 2'-deoxy-2'-fluorouridine-3'-phosphate
  modified_base 21: mod_base = OTHER; note = 2'-O-methyluridine-3'-phosphorothioate
  modified_base 22: mod_base = OTHER; note = 2'-deoxy-2'-fluorouridine-3'-phosphorothioate
  modified_base 23: mod_base = OTHER; note = 2'-O-methyluridine
ttatagagcaagaacactgtttt

SEQ ID NO: 700 - DNA, 21 bp, synthetic construct
  source 1..21: mol_type = other DNA
  modified_base 1: mod_base = OTHER; note = uridine-3'-phosphate
  modified_base 2: mod_base = OTHER; note = 2'-O-methyluridine-3'-phosphate
  modified_base 3: mod_base = OTHER; note = adenosine-3'-phosphate
  modified_base 4: mod_base = OTHER; note = 2'-O-methyluridine-3'-phosphate
  modified_base 5: mod_base = OTHER; note = adenosine-3'-phosphate
  modified_base 6: mod_base = OTHER; note = guanosine-3'-phosphate
  modified_base 7: mod_base = OTHER; note = adenosine-3'-phosphate
  modified_base 8: mod_base = OTHER; note = guanosine-3'-phosphate
  modified_base 9: mod_base = OTHER; note = 2'-O-methylcytidine-3'-phosphate
  modified_base 10: mod_base = OTHER; note = adenosine-3'-phosphate
  modified_base 11: mod_base = OTHER; note = adenosine-3'-phosphate
  modified_base 12: mod_base = OTHER; note = guanosine-3'-phosphate
  modified_base 13: mod_base = OTHER; note = adenosine-3'-phosphate
  modified_base 14: mod_base = OTHER; note = adenosine-3'-phosphate
  modified_base 15: mod_base = OTHER; note = 2'-O-methylcytidine-3'-phosphate
  modified_base 16: mod_base = OTHER; note = adenosine-3'-phosphate
  modified_base 17: mod_base = OTHER; note = cytidine-3'-phosphate
  modified_base 18: mod_base = OTHER; note = uridine-3'-phosphate
  modified_base 19: mod_base = OTHER; note = guanosine-3'-phosphate
  misc_feature 1..19: note = RNA
  misc_feature 20..21: note = DNA
ttatagagcaagaacactgtt

SEQ ID NO: 701 - RNA, 23 nt, synthetic construct
  source 1..23: mol_type = other RNA
  modified_base 1: mod_base = OTHER; note = 2'-O-methyluridine-3'-phosphate
  modified_base 2: mod_base = OTHER; note = 2'-deoxy-2'-fluorouridine-3'-phosphate
  modified_base 3: mod_base = OTHER; note = 2'-deoxy-2'-fluoroadenosine-3'-phosphate
  modified_base 4: mod_base = OTHER; note = 2'-deoxy-2'-fluorouridine-3'-phosphate
  modified_base 5: mod_base = OTHER; note = 2'-O-methyladenosine-3'-phosphate
  modified_base 6: mod_base = OTHER; note = 2'-deoxy-2'-fluoroguanosine-3'-phosphate
  modified_base 7: mod_base = OTHER; note = 2'-O-methyladenosine-3'-phosphate
  modified_base 8: mod_base = OTHER; note = 2'-deoxy-2'-fluoroguanosine-3'-phosphate
  modified_base 9: mod_base = OTHER; note = 2'-O-methylcytidine-3'-phosphate
  modified_base 10: mod_base = OTHER; note = 2'-deoxy-2'-fluoroadenosine-3'-phosphate
  modified_base 11: mod_base = OTHER; note = 2'-O-methyladenosine-3'-phosphate
  modified_base 12: mod_base = OTHER; note = 2'-O-methylguanosine-3'-phosphate
  modified_base 13: mod_base = OTHER; note = 2'-O-methyladenosine-3'-phosphate
  modified_base 14: mod_base = OTHER; note = 2'-deoxy-2'-fluoroadenosine-3'-phosphate
  modified_base 15: mod_base = OTHER; note = 2'-O-methylcytidine-3'-phosphate
  modified_base 16: mod_base = OTHER; note = 2'-deoxy-2'-fluoroadenosine-3'-phosphate
  modified_base 17: mod_base = OTHER; note = 2'-O-methylcytidine-3'-phosphate
  modified_base 18: mod_base = OTHER; note = 2'-deoxy-2'-fluorouridine-3'-phosphate
  modified_base 19: mod_base = OTHER; note = 2'-O-methylguanosine-3'-phosphate
  modified_base 20: mod_base = OTHER; note = 2'-deoxy-2'-fluorouridine-3'-phosphate
  modified_base 21: mod_base = OTHER; note = 2'-O-methyluridine-3'-phosphorothioate
  modified_base 22: mod_base = OTHER; note = 2'-deoxy-2'-fluorouridine-3'-phosphorothioate
  modified_base 23: mod_base = OTHER; note = 2'-O-methyluridine
ttatagagcaagaacactgtttt

SEQ ID NO: 702 - RNA, 23 nt, synthetic construct
  source 1..23: mol_type = other RNA
  modified_base 1: mod_base = OTHER; note = 2'-O-methyluridine-3'-phosphate
  modified_base 2: mod_base = OTHER; note = 2'-deoxy-2'-fluorouridine-3'-phosphate
  modified_base 3: mod_base = OTHER; note = 2'-O-methyladenosine-3'-phosphate
  modified_base 4: mod_base = OTHER; note = 2'-deoxy-2'-fluorouridine-3'-phosphate
  modified_base 5: mod_base = OTHER; note = 2'-O-methyladenosine-3'-phosphate
  modified_base 6: mod_base = OTHER; note = 2'-O-methylguanosine-3'-phosphate
  modified_base 7: mod_base = OTHER; note = 2'-O-methyladenosine-3'-phosphate
  modified_base 8: mod_base = OTHER; note = 2'-deoxy-2'-fluoroguanosine-3'-phosphate
  modified_base 9: mod_base = OTHER; note = 2'-O-methylcytidine-3'-phosphate
  modified_base 10: mod_base = OTHER; note = 2'-deoxy-2'-fluoroadenosine-3'-phosphate
  modified_base 11: mod_base = OTHER; note = 2'-O-methyladenosine-3'-phosphate
  modified_base 12: mod_base = OTHER; note = 2'-deoxy-2'-fluoroguanosine-3'-phosphate
  modified_base 13: mod_base = OTHER; note = 2'-O-methyladenosine-3'-phosphate
  modified_base 14: mod_base = OTHER; note = 2'-deoxy-2'-fluoroadenosine-3'-phosphate
  modified_base 15: mod_base = OTHER; note = 2'-O-methylcytidine-3'-phosphate
  modified_base 16: mod_base = OTHER; note = 2'-deoxy-2'-fluoroadenosine-3'-phosphate
  modified_base 17: mod_base = OTHER; note = 2'-deoxy-2'-fluorocytidine-3'-phosphate
  modified_base 18: mod_base = OTHER; note = 2'-deoxy-2'-fluorouridine-3'-phosphate
  modified_base 19: mod_base = OTHER; note = 2'-O-methylguanosine-3'-phosphate
  modified_base 20: mod_base = OTHER; note = 2'-deoxy-2'-fluorouridine-3'-phosphate
  modified_base 21: mod_base = OTHER; note = 2'-O-methyluridine-3'-phosphorothioate
  modified_base 22: mod_base = OTHER; note = 2'-deoxy-2'-fluorouridine-3'-phosphorothioate
  modified_base 23: mod_base = OTHER; note = 2'-O-methyluridine
ttatagagcaagaacactgtttt

SEQ ID NO: 703 - RNA, 23 nt, synthetic construct
  source 1..23: mol_type = other RNA
  modified_base 1: mod_base = OTHER; note = 2'-O-methyluridine-3'-phosphate
  modified_base 2: mod_base = OTHER; note = 2'-deoxy-2'-fluorouridine-3'-phosphate
  modified_base 3: mod_base = OTHER; note = 2'-O-methyladenosine-3'-phosphate
  modified_base 4: mod_base = OTHER; note = 2'-deoxy-2'-fluorouridine-3'-phosphate
  modified_base 5: mod_base = OTHER; note = 2'-O-methyladenosine-3'-phosphate
  modified_base 6: mod_base = OTHER; note = 2'-deoxy-2'-fluoroguanosine-3'-phosphate
  modified_base 7: mod_base = OTHER; note = 2'-O-methyladenosine-3'-phosphate
  modified_base 8: mod_base = OTHER; note = 2'-deoxy-2'-fluoroguanosine-3'-phosphate
  modified_base 9: mod_base = OTHER; note = 2'-deoxy-2'-fluorocytidine-3'-phosphate
  modified_base 10: mod_base = OTHER; note = 2'-deoxy-2'-fluoroadenosine-3'-phosphate
  modified_base 11: mod_base = OTHER; note = 2'-O-methyladenosine-3'-phosphate
  modified_base 12: mod_base = OTHER; note = 2'-O-methylguanosine-3'-phosphate
  modified_base 13: mod_base = OTHER; note = 2'-O-methyladenosine-3'-phosphate
  modified_base 14: mod_base = OTHER; note = 2'-deoxy-2'-fluoroadenosine-3'-phosphate
  modified_base 15: mod_base = OTHER; note = 2'-O-methylcytidine-3'-phosphate
  modified_base 16: mod_base = OTHER; note = 2'-deoxy-2'-fluoroadenosine-3'-phosphate
  modified_base 17: mod_base = OTHER; note = 2'-O-methylcytidine-3'-phosphate
  modified_base 18: mod_base = OTHER; note = 2'-deoxy-2'-fluorouridine-3'-phosphate
  modified_base 19: mod_base = OTHER; note = 2'-O-methylguanosine-3'-phosphate
  modified_base 20: mod_base = OTHER; note = 2'-deoxy-2'-fluorouridine-3'-phosphate
  modified_base 21: mod_base = OTHER; note = 2'-O-methyluridine-3'-phosphorothioate
  modified_base 22: mod_base = OTHER; note = 2'-deoxy-2'-fluorouridine-3'-phosphorothioate
  modified_base 23: mod_base = OTHER; note = 2'-O-methyluridine
ttatagagcaagaacactgtttt

SEQ ID NO: 704 - DNA, 21 bp, synthetic construct
  source 1..21: mol_type = other DNA
  modified_base 1: mod_base = OTHER; note = uridine-3'-phosphate
  modified_base 2: mod_base = OTHER; note = 2'-O-methyluridine-3'-phosphate
  modified_base 3: mod_base = OTHER; note = adenosine-3'-phosphate
  modified_base 4: mod_base = OTHER; note = 2'-O-methyluridine-3'-phosphate
  modified_base 5: mod_base = OTHER; note = adenosine-3'-phosphate
  modified_base 6: mod_base = OTHER; note = guanosine-3'-phosphate
  modified_base 7: mod_base = OTHER; note = adenosine-3'-phosphate
  modified_base 8: mod_base = OTHER; note = guanosine-3'-phosphate
  modified_base 9: mod_base = OTHER; note = 2'-O-methylcytidine-3'-phosphate
  modified_base 10: mod_base = OTHER; note = adenosine-3'-phosphate
  modified_base 11: mod_base = OTHER; note = adenosine-3'-phosphate
  modified_base 12: mod_base = OTHER; note = guanosine-3'-phosphate
  modified_base 13: mod_base = OTHER; note = adenosine-3'-phosphate
  modified_base 14: mod_base = OTHER; note = adenosine-3'-phosphate
  modified_base 15: mod_base = OTHER; note = 2'-O-methylcytidine-3'-phosphate
  modified_base 16: mod_base = OTHER; note = adenosine-3'-phosphate
  modified_base 17: mod_base = OTHER; note = cytidine-3'-phosphate
  modified_base 18: mod_base = OTHER; note = uridine-3'-phosphate
  modified_base 19: mod_base = OTHER; note = guanosine-3'-phosphate
  misc_feature 1..19: note = RNA
  misc_feature 20..21: note = DNA
ttatagagcaagaacactgtt

SEQ ID NO: 705 - RNA, 23 nt, synthetic construct
  source 1..23: mol_type = other RNA
  modified_base 1: mod_base = OTHER; note = 2'-deoxy-2'-fluorouridine-3'-phosphate
  modified_base 2: mod_base = OTHER; note = 2'-deoxy-2'-fluorouridine-3'-phosphate
  modified_base 3: mod_base = OTHER; note = 2'-O-methyladenosine-3'-phosphate
  modified_base 4: mod_base = OTHER; note = 2'-deoxy-2'-fluorouridine-3'-phosphate
  modified_base 5: mod_base = OTHER; note = 2'-O-methyladenosine-3'-phosphate
  modified_base 6: mod_base = OTHER; note = 2'-deoxy-2'-fluoroguanosine-3'-phosphate
  modified_base 7: mod_base = OTHER; note = 2'-O-methyladenosine-3'-phosphate
  modified_base 8: mod_base = OTHER; note = 2'-deoxy-2'-fluoroguanosine-3'-phosphate
  modified_base 9: mod_base = OTHER; note = 2'-O-methylcytidine-3'-phosphate
  modified_base 10: mod_base = OTHER; note = 2'-deoxy-2'-fluoroadenosine-3'-phosphate
  modified_base 11: mod_base = OTHER; note = 2'-O-methyladenosine-3'-phosphate
  modified_base 12: mod_base = OTHER; note = 2'-deoxy-2'-fluoroguanosine-3'-phosphate
  modified_base 13: mod_base = OTHER; note = 2'-O-methyladenosine-3'-phosphate
  modified_base 14: mod_base = OTHER; note = 2'-deoxy-2'-fluoroadenosine-3'-phosphate
  modified_base 15: mod_base = OTHER; note = 2'-O-methylcytidine-3'-phosphate
  modified_base 16: mod_base = OTHER; note = 2'-deoxy-2'-fluoroadenosine-3'-phosphate
  modified_base 17: mod_base = OTHER; note = 2'-O-methylcytidine-3'-phosphate
  modified_base 18: mod_base = OTHER; note = 2'-deoxy-2'-fluorouridine-3'-phosphate
  modified_base 19: mod_base = OTHER; note = 2'-O-methylguanosine-3'-phosphate
  modified_base 20: mod_base = OTHER; note = 2'-deoxy-2'-fluorouridine-3'-phosphate
  modified_base 21: mod_base = OTHER; note = 2'-O-methyluridine-3'-phosphorothioate
  modified_base 22: mod_base = OTHER; note = 2'-O-methyluridine-3'-phosphorothioate
  modified_base 23: mod_base = OTHER; note = 2'-O-methyluridine
ttatagagcaagaacactgtttt

SEQ ID NO: 706 - RNA, 23 nt, synthetic construct
  source 1..23: mol_type = other RNA
  modified_base 1: mod_base = OTHER; note = 2'-deoxy-2'-fluorouridine-3'-phosphate
  modified_base 2: mod_base = OTHER; note = 2'-deoxy-2'-fluorouridine-3'-phosphate
  modified_base 3: mod_base = OTHER; note = 2'-O-methyladenosine-3'-phosphate
  modified_base 4: mod_base = OTHER; note = 2'-deoxy-2'-fluorouridine-3'-phosphate
  modified_base 5: mod_base = OTHER; note = 2'-O-methyladenosine-3'-phosphate
  modified_base 6: mod_base = OTHER; note = 2'-deoxy-2'-fluoroguanosine-3'-phosphate
  modified_base 7: mod_base = OTHER; note = 2'-O-methyladenosine-3'-phosphate
  modified_base 8: mod_base = OTHER; note = 2'-deoxy-2'-fluoroguanosine-3'-phosphate
  modified_base 9: mod_base = OTHER; note = 2'-O-methylcytidine-3'-phosphate
  modified_base 10: mod_base = OTHER; note = 2'-deoxy-2'-fluoroadenosine-3'-phosphate
  modified_base 11: mod_base = OTHER; note = 2'-O-methyladenosine-3'-phosphate
  modified_base 12: mod_base = OTHER; note = 2'-deoxy-2'-fluoroguanosine-3'-phosphate
  modified_base 13: mod_base = OTHER; note = 2'-O-methyladenosine-3'-phosphate
  modified_base 14: mod_base = OTHER; note = 2'-deoxy-2'-fluoroadenosine-3'-phosphate
  modified_base 15: mod_base = OTHER; note = 2'-O-methylcytidine-3'-phosphate
  modified_base 16: mod_base = OTHER; note = 2'-deoxy-2'-fluoroadenosine-3'-phosphate
  modified_base 17: mod_base = OTHER; note = 2'-O-methylcytidine-3'-phosphate
  modified_base 18: mod_base = OTHER; note = 2'-O-methyluridine-3'-phosphate
  modified_base 19: mod_base = OTHER; note = 2'-O-methylguanosine-3'-phosphate
  modified_base 20: mod_base = OTHER; note = 2'-deoxy-2'-fluorouridine-3'-phosphate
  modified_base 21: mod_base = OTHER; note = 2'-O-methyluridine-3'-phosphorothioate
  modified_base 22: mod_base = OTHER; note = 2'-deoxy-2'-fluorouridine-3'-phosphorothioate
  modified_base 23: mod_base = OTHER; note = 2'-O-methyluridine
ttatagagcaagaacactgtttt

SEQ ID NO: 707 - RNA, 23 nt, synthetic construct
  source 1..23: mol_type = other RNA
  modified_base 1: mod_base = OTHER; note = 2'-O-methyluridine-3'-phosphate
  modified_base 2: mod_base = OTHER; note = 2'-deoxy-2'-fluorouridine-3'-phosphate
  modified_base 3: mod_base = OTHER; note = 2'-O-methyladenosine-3'-phosphate
  modified_base 4: mod_base = OTHER; note = 2'-deoxy-2'-fluorouridine-3'-phosphate
  modified_base 5: mod_base = OTHER; note = 2'-O-methyladenosine-3'-phosphate
  modified_base 6: mod_base = OTHER; note = 2'-deoxy-2'-fluoroguanosine-3'-phosphate
  modified_base 7: mod_base = OTHER; note = 2'-O-methyladenosine-3'-phosphate
  modified_base 8: mod_base = OTHER; note = 2'-deoxy-2'-fluoroguanosine-3'-phosphate
  modified_base 9: mod_base = OTHER; note = 2'-O-methylcytidine-3'-phosphate
  modified_base 10: mod_base = OTHER; note = 2'-deoxy-2'-fluoroadenosine-3'-phosphate
  modified_base 11: mod_base = OTHER; note = 2'-O-methyladenosine-3'-phosphate
  modified_base 12: mod_base = OTHER; note = 2'-deoxy-2'-fluoroguanosine-3'-phosphate
  modified_base 13: mod_base = OTHER; note = 2'-O-methyladenosine-3'-phosphate
  modified_base 14: mod_base = OTHER; note = 2'-deoxy-2'-fluoroadenosine-3'-phosphate
  modified_base 15: mod_base = OTHER; note = 2'-O-methylcytidine-3'-phosphate
  modified_base 16: mod_base = OTHER; note = 2'-deoxy-2'-fluoroadenosine-3'-phosphate
  modified_base 17: mod_base = OTHER; note = 2'-O-methylcytidine-3'-phosphate
  modified_base 18: mod_base = OTHER; note = 2'-deoxy-2'-fluorouridine-3'-phosphate
  modified_base 19: mod_base = OTHER; note = 2'-O-methylguanosine-3'-phosphate
  modified_base 20: mod_base = OTHER; note = 2'-deoxy-2'-fluorouridine-3'-phosphate
  modified_base 21: mod_base = OTHER; note = 2'-O-methyluridine-3'-phosphorothioate
  modified_base 22: mod_base = OTHER; note = 2'-deoxy-2'-fluorouridine-3'-phosphorothioate
  modified_base 23: mod_base = OTHER; note = 2'-O-methyluridine
ttatagagcaagaacactgtttt

SEQ ID NO: 708 - RNA, 23 nt, synthetic construct
  source 1..23: mol_type = other RNA
  modified_base 1: mod_base = OTHER; note = 2'-O-methyluridine-3'-phosphate
  modified_base 2: mod_base = OTHER; note = 2'-deoxy-2'-fluorouridine-3'-phosphate
  modified_base 3: mod_base = OTHER; note = 2'-O-methyladenosine-3'-phosphate
  modified_base 4: mod_base = OTHER; note = 2'-deoxy-2'-fluorouridine-3'-phosphate
  modified_base 5: mod_base = OTHER; note = 2'-O-methyladenosine-3'-phosphate
  modified_base 6: mod_base = OTHER; note = 2'-deoxy-2'-fluoroguanosine-3'-phosphate
  modified_base 7: mod_base = OTHER; note = 2'-deoxy-2'-fluoroadenosine-3'-phosphate
  modified_base 8: mod_base = OTHER; note = 2'-deoxy-2'-fluoroguanosine-3'-phosphate
  modified_base 9: mod_base = OTHER; note = 2'-O-methylcytidine-3'-phosphate
  modified_base 10: mod_base = OTHER; note = 2'-deoxy-2'-fluoroadenosine-3'-phosphate
  modified_base 11: mod_base = OTHER; note = 2'-O-methyladenosine-3'-phosphate
  modified_base 12: mod_base = OTHER; note = 2'-deoxy-2'-fluoroguanosine-3'-phosphate
  modified_base 13: mod_base = OTHER; note = 2'-O-methyladenosine-3'-phosphate
  modified_base 14: mod_base = OTHER; note = 2'-deoxy-2'-fluoroadenosine-3'-phosphate
  modified_base 15: mod_base = OTHER; note = 2'-O-methylcytidine-3'-phosphate
  modified_base 16: mod_base = OTHER; note = 2'-deoxy-2'-fluoroadenosine-3'-phosphate
  modified_base 17: mod_base = OTHER; note = 2'-O-methylcytidine-3'-phosphate
  modified_base 18: mod_base = OTHER; note = 2'-deoxy-2'-fluorouridine-3'-phosphate
  modified_base 19: mod_base = OTHER; note = 2'-O-methylguanosine-3'-phosphate
  modified_base 20: mod_base = OTHER; note = 2'-deoxy-2'-fluorouridine-3'-phosphate
  modified_base 21: mod_base = OTHER; note = 2'-O-methyluridine-3'-phosphorothioate
  modified_base 22: mod_base = OTHER; note = 2'-O-methyluridine-3'-phosphorothioate
  modified_base 23: mod_base = OTHER; note = 2'-O-methyluridine
ttatagagcaagaacactgtttt

SEQ ID NO: 709 - RNA, 23 nt, synthetic construct
  source 1..23: mol_type = other RNA
  modified_base 1: mod_base = OTHER; note = 2'-O-methyluridine-3'-phosphate
  modified_base 2: mod_base = OTHER; note = 2'-deoxy-2'-fluorouridine-3'-phosphate
  modified_base 3: mod_base = OTHER; note = 2'-O-methyladenosine-3'-phosphate
  modified_base 4: mod_base = OTHER; note = 2'-deoxy-2'-fluorouridine-3'-phosphate
  modified_base 5: mod_base = OTHER; note = 2'-O-methyladenosine-3'-phosphate
  modified_base 6: mod_base = OTHER; note = 2'-deoxy-2'-fluoroguanosine-3'-phosphate
  modified_base 7: mod_base = OTHER; note = 2'-O-methyladenosine-3'-phosphate
  modified_base 8: mod_base = OTHER; note = 2'-deoxy-2'-fluoroguanosine-3'-phosphate
  modified_base 9: mod_base = OTHER; note = 2'-O-methylcytidine-3'-phosphate
  modified_base 10: mod_base = OTHER; note = 2'-deoxy-2'-fluoroadenosine-3'-phosphate
  modified_base 11: mod_base = OTHER; note = 2'-O-methyladenosine-3'-phosphate
  modified_base 12: mod_base = OTHER; note = 2'-deoxy-2'-fluoroguanosine-3'-phosphate
  modified_base 13: mod_base = OTHER; note = 2'-O-methyladenosine-3'-phosphate
  modified_base 14: mod_base = OTHER; note = 2'-deoxy-2'-fluoroadenosine-3'-phosphate
  modified_base 15: mod_base = OTHER; note = 2'-O-methylcytidine-3'-phosphate
  modified_base 16: mod_base = OTHER; note = 2'-deoxy-2'-fluoroadenosine-3'-phosphate
  modified_base 17: mod_base = OTHER; note = 2'-O-methylcytidine-3'-phosphate
  modified_base 18: mod_base = OTHER; note = 2'-deoxy-2'-fluorouridine-3'-phosphate
  modified_base 19: mod_base = OTHER; note = 2'-deoxy-2'-fluoroguanosine-3'-phosphate
  modified_base 20: mod_base = OTHER; note = 2'-deoxy-2'-fluorouridine-3'-phosphate
  modified_base 21: mod_base = OTHER; note = 2'-O-methyluridine-3'-phosphorothioate
  modified_base 22: mod_base = OTHER; note = 2'-deoxy-2'-fluorouridine-3'-phosphorothioate
  modified_base 23: mod_base = OTHER; note = 2'-O-methyluridine
ttatagagcaagaacactgtttt

SEQ ID NO: 710 - RNA, 23 nt, synthetic construct
  source 1..23: mol_type = other RNA
  modified_base 1: mod_base = OTHER; note = 2'-O-methyluridine-3'-phosphate
  modified_base 2: mod_base = OTHER; note = 2'-deoxy-2'-fluorouridine-3'-phosphate
  modified_base 3: mod_base = OTHER; note = 2'-O-methyladenosine-3'-phosphate
  modified_base 4: mod_base = OTHER; note = 2'-deoxy-2'-fluorouridine-3'-phosphate
  modified_base 5: mod_base = OTHER; note = 2'-O-methyladenosine-3'-phosphate
  modified_base 6: mod_base = OTHER; note = 2'-deoxy-2'-fluoroguanosine-3'-phosphate
  modified_base 7: mod_base = OTHER; note = 2'-deoxy-2'-fluoroadenosine-3'-phosphate
  modified_base 8: mod_base = OTHER; note = 2'-deoxy-2'-fluoroguanosine-3'-phosphate
  modified_base 9: mod_base = OTHER; note = 2'-O-methylcytidine-3'-phosphate
  modified_base 10: mod_base = OTHER; note = 2'-deoxy-2'-fluoroadenosine-3'-phosphate
  modified_base 11: mod_base = OTHER; note = 2'-O-methyladenosine-3'-phosphate
  modified_base 12: mod_base = OTHER; note = 2'-deoxy-2'-fluoroguanosine-3'-phosphate
  modified_base 13: mod_base = OTHER; note = 2'-O-methyladenosine-3'-phosphate
  modified_base 14: mod_base = OTHER; note = 2'-deoxy-2'-fluoroadenosine-3'-phosphate
  modified_base 15: mod_base = OTHER; note = 2'-O-methylcytidine-3'-phosphate
  modified_base 16: mod_base = OTHER; note = 2'-deoxy-2'-fluoroadenosine-3'-phosphate
  modified_base 17: mod_base = OTHER; note = 2'-O-methylcytidine-3'-phosphate
  modified_base 18: mod_base = OTHER; note = 2'-deoxy-2'-fluorouridine-3'-phosphate
  modified_base 19: mod_base = OTHER; note = 2'-O-methylguanosine-3'-phosphate
  modified_base 20: mod_base = OTHER; note = 2'-O-methyluridine-3'-phosphate
  modified_base 21: mod_base = OTHER; note = 2'-O-methyluridine-3'-phosphorothioate
  modified_base 22: mod_base = OTHER; note = 2'-deoxy-2'-fluorouridine-3'-phosphorothioate
  modified_base 23: mod_base = OTHER; note = 2'-O-methyluridine
ttatagagcaagaacactgtttt

SEQ ID NO: 711 - RNA, 23 nt, synthetic construct
  source 1..23: mol_type = other RNA
  modified_base 1: mod_base = OTHER; note = 2'-O-methyluridine-3'-phosphate
  modified_base 2: mod_base = OTHER; note = 2'-deoxy-2'-fluorouridine-3'-phosphate
  modified_base 3: mod_base = OTHER; note = 2'-deoxy-2'-fluoroadenosine-3'-phosphate
  modified_base 4: mod_base = OTHER; note = 2'-deoxy-2'-fluorouridine-3'-phosphate
  modified_base 5: mod_base = OTHER; note = 2'-O-methyladenosine-3'-phosphate
  modified_base 6: mod_base = OTHER; note = 2'-deoxy-2'-fluoroguanosine-3'-phosphate
  modified_base 7: mod_base = OTHER; note = 2'-O-methyladenosine-3'-phosphate
  modified_base 8: mod_base = OTHER; note = 2'-deoxy-2'-fluoroguanosine-3'-phosphate
  modified_base 9: mod_base = OTHER; note = 2'-O-methylcytidine-3'-phosphate
  modified_base 10: mod_base = OTHER; note = 2'-deoxy-2'-fluoroadenosine-3'-phosphate
  modified_base 11: mod_base = OTHER; note = 2'-O-methyladenosine-3'-phosphate
  modified_base 12: mod_base = OTHER; note = 2'-deoxy-2'-fluoroguanosine-3'-phosphate
  modified_base 13: mod_base = OTHER; note = 2'-O-methyladenosine-3'-phosphate
  modified_base 14: mod_base = OTHER; note = 2'-deoxy-2'-fluoroadenosine-3'-phosphate
  modified_base 15: mod_base = OTHER; note = 2'-O-methylcytidine-3'-phosphate
  modified_base 16: mod_base = OTHER; note = 2'-deoxy-2'-fluoroadenosine-3'-phosphate
  modified_base 17: mod_base = OTHER; note = 2'-O-methylcytidine-3'-phosphate
  modified_base 18: mod_base = OTHER; note = 2'-O-methyluridine-3'-phosphate
  modified_base 19: mod_base = OTHER; note = 2'-O-methylguanosine-3'-phosphate
  modified_base 20: mod_base = OTHER; note = 2'-deoxy-2'-fluorouridine-3'-phosphate
  modified_base 21: mod_base = OTHER; note = 2'-O-methyluridine-3'-phosphorothioate
  modified_base 22: mod_base = OTHER; note = 2'-deoxy-2'-fluorouridine-3'-phosphorothioate
  modified_base 23: mod_base = OTHER; note = 2'-O-methyluridine
ttatagagcaagaacactgtttt

SEQ ID NO: 712 - RNA, 23 nt, synthetic construct
  source 1..23: mol_type = other RNA
  modified_base 1: mod_base = OTHER; note = 2'-O-methyluridine-3'-phosphate
  modified_base 2: mod_base = OTHER; note = 2'-deoxy-2'-fluorouridine-3'-phosphate
  modified_base 3: mod_base = OTHER; note = 2'-O-methyladenosine-3'-phosphate
  modified_base 4: mod_base = OTHER; note = 2'-deoxy-2'-fluorouridine-3'-phosphate
  modified_base 5: mod_base = OTHER; note = 2'-O-methyladenosine-3'-phosphate
  modified_base 6: mod_base = OTHER; note = 2'-deoxy-2'-fluoroguanosine-3'-phosphate
  modified_base 7: mod_base = OTHER; note = 2'-O-methyladenosine-3'-phosphate
  modified_base 8: mod_base = OTHER; note = 2'-deoxy-2'-fluoroguanosine-3'-phosphate
  modified_base 9: mod_base = OTHER; note = 2'-deoxy-2'-fluorocytidine-3'-phosphate
  modified_base 10: mod_base = OTHER; note = 2'-deoxy-2'-fluoroadenosine-3'-phosphate
  modified_base 11: mod_base = OTHER; note = 2'-O-methyladenosine-3'-phosphate
  modified_base 12: mod_base = OTHER; note = 2'-deoxy-2'-fluoroguanosine-3'-phosphate
  modified_base 13: mod_base = OTHER; note = 2'-O-methyladenosine-3'-phosphate
  modified_base 14: mod_base = OTHER; note = 2'-deoxy-2'-fluoroadenosine-3'-phosphate
  modified_base 15: mod_base = OTHER; note = 2'-O-methylcytidine-3'-phosphate
  modified_base 16: mod_base = OTHER; note = 2'-deoxy-2'-fluoroadenosine-3'-phosphate
  modified_base 17: mod_base = OTHER; note = 2'-O-methylcytidine-3'-phosphate
  modified_base 18: mod_base = OTHER; note = 2'-deoxy-2'-fluorouridine-3'-phosphate
  modified_base 19: mod_base = OTHER; note = 2'-O-methylguanosine-3'-phosphate
  modified_base 20: mod_base = OTHER; note = 2'-deoxy-2'-fluorouridine-3'-phosphate
  modified_base 21: mod_base = OTHER; note = 2'-O-methyluridine-3'-phosphorothioate
  modified_base 22: mod_base = OTHER; note = 2'-O-methyluridine-3'-phosphorothioate
  modified_base 23: mod_base = OTHER; note = 2'-O-methyluridine
ttatagagcaagaacactgtttt

SEQ ID NO: 713 - RNA, 23 nt, synthetic construct
  source 1..23: mol_type = other RNA
  modified_base 1: mod_base = OTHER; note = 2'-O-methyluridine-3'-phosphate
  modified_base 2: mod_base = OTHER; note = 2'-deoxy-2'-fluorouridine-3'-phosphate
  modified_base 3: mod_base = OTHER; note = 2'-O-methyladenosine-3'-phosphate
  modified_base 4: mod_base = OTHER; note = 2'-deoxy-2'-fluorouridine-3'-phosphate
  modified_base 5: mod_base = OTHER; note = 2'-O-methyladenosine-3'-phosphate
  modified_base 6: mod_base = OTHER; note = 2'-deoxy-2'-fluoroguanosine-3'-phosphate
  modified_base 7: mod_base = OTHER; note = 2'-O-methyladenosine-3'-phosphate
  modified_base 8: mod_base = OTHER; note = 2'-deoxy-2'-fluoroguanosine-3'-phosphate
  modified_base 9: mod_base = OTHER; note = 2'-deoxy-2'-fluorocytidine-3'-phosphate
  modified_base 10: mod_base = OTHER; note = 2'-deoxy-2'-fluoroadenosine-3'-phosphate
  modified_base 11: mod_base = OTHER; note = 2'-O-methyladenosine-3'-phosphate
  modified_base 12: mod_base = OTHER; note = 2'-deoxy-2'-fluoroguanosine-3'-phosphate
  modified_base 13: mod_base = OTHER; note = 2'-O-methyladenosine-3'-phosphate
  modified_base 14: mod_base = OTHER; note = 2'-deoxy-2'-fluoroadenosine-3'-phosphate
  modified_base 15: mod_base = OTHER; note = 2'-O-methylcytidine-3'-phosphate
  modified_base 16: mod_base = OTHER; note = 2'-deoxy-2'-fluoroadenosine-3'-phosphate
  modified_base 17: mod_base = OTHER; note = 2'-O-methylcytidine-3'-phosphate
  modified_base 18: mod_base = OTHER; note = 2'-deoxy-2'-fluorouridine-3'-phosphate
  modified_base 19: mod_base = OTHER; note = 2'-O-methylguanosine-3'-phosphate
  modified_base 20: mod_base = OTHER; note = 2'-deoxy-2'-fluorouridine-3'-phosphate
  modified_base 21: mod_base = OTHER; note = 2'-O-methyluridine-3'-phosphorothioate
  modified_base 22: mod_base = OTHER; note = 2'-deoxy-2'-fluorouridine-3'-phosphorothioate
  modified_base 23: mod_base = OTHER; note = 2'-O-methyluridine
ttatagagcaagaacactgtttt

SEQ ID NO: 714 - RNA, 23 nt, synthetic construct
  source 1..23: mol_type = other RNA
  modified_base 1: mod_base = OTHER; note = 2'-O-methyluridine-3'-phosphate
  modified_base 2: mod_base = OTHER; note = 2'-deoxy-2'-fluorouridine-3'-phosphate
  modified_base 3: mod_base = OTHER; note = 2'-O-methyladenosine-3'-phosphate
  modified_base 4: mod_base = OTHER; note = 2'-deoxy-2'-fluorouridine-3'-phosphate
  modified_base 5: mod_base = OTHER; note = 2'-O-methyladenosine-3'-phosphate
  modified_base 6: mod_base = OTHER; note = 2'-deoxy-2'-fluoroguanosine-3'-phosphate
  modified_base 7: mod_base = OTHER; note = 2'-deoxy-2'-fluoroadenosine-3'-phosphate
  modified_base 8: mod_base = OTHER; note = 2'-deoxy-2'-fluoroguanosine-3'-phosphate
  modified_base 9: mod_base = OTHER; note = 2'-O-methylcytidine-3'-phosphate
  modified_base 10: mod_base = OTHER; note = 2'-O-methyladenosine-3'-phosphate
  modified_base 11: mod_base = OTHER; note = 2'-O-methyladenosine-3'-phosphate
  modified_base 12: mod_base = OTHER; note = 2'-deoxy-2'-fluoroguanosine-3'-phosphate
  modified_base 13: mod_base = OTHER; note = 2'-O-methyladenosine-3'-phosphate
  modified_base 14: mod_base = OTHER; note = 2'-deoxy-2'-fluoroadenosine-3'-phosphate
  modified_base 15: mod_base = OTHER; note = 2'-O-methylcytidine-3'-phosphate
  modified_base 16: mod_base = OTHER; note = 2'-deoxy-2'-fluoroadenosine-3'-phosphate
  modified_base 17: mod_base = OTHER; note = 2'-O-methylcytidine-3'-phosphate
  modified_base 18: mod_base = OTHER; note = 2'-deoxy-2'-fluorouridine-3'-phosphate
  modified_base 19: mod_base = OTHER; note = 2'-O-methylguanosine-3'-phosphate
  modified_base 20: mod_base = OTHER; note = 2'-deoxy-2'-fluorouridine-3'-phosphate
  modified_base 21: mod_base = OTHER; note = 2'-O-methyluridine-3'-phosphorothioate
  modified_base 22: mod_base = OTHER; note = 2'-deoxy-2'-fluorouridine-3'-phosphorothioate
  modified_base 23: mod_base = OTHER; note = 2'-O-methyluridine
ttatagagcaagaacactgtttt

SEQ ID NO: 715 - RNA, 23 nt, synthetic construct
  source 1..23: mol_type = other RNA
  modified_base 1: mod_base = OTHER; note = 2'-deoxy-2'-fluorouridine-3'-phosphate
  modified_base 2: mod_base = OTHER; note = 2'-deoxy-2'-fluorouridine-3'-phosphate
  modified_base 3: mod_base = OTHER; note = 2'-O-methyladenosine-3'-phosphate
  modified_base 4: mod_base = OTHER; note = 2'-deoxy-2'-fluorouridine-3'-phosphate
  modified_base 5: mod_base = OTHER; note = 2'-O-methyladenosine-3'-phosphate
  modified_base 6: mod_base = OTHER; note = 2'-deoxy-2'-fluoroguanosine-3'-phosphate
  modified_base 7: mod_base = OTHER; note = 2'-O-methyladenosine-3'-phosphate
  modified_base 8: mod_base = OTHER; note = 2'-deoxy-2'-fluoroguanosine-3'-phosphate
  modified_base 9: mod_base = OTHER; note = 2'-O-methylcytidine-3'-phosphate
  modified_base 10: mod_base = OTHER; note = 2'-deoxy-2'-fluoroadenosine-3'-phosphate
  modified_base 11: mod_base = OTHER; note = 2'-O-methyladenosine-3'-phosphate
  modified_base 12: mod_base = OTHER; note = 2'-deoxy-2'-fluoroguanosine-3'-phosphate
  modified_base 13: mod_base = OTHER; note = 2'-O-methyladenosine-3'-phosphate
  modified_base 14: mod_base = OTHER; note = 2'-deoxy-2'-fluoroadenosine-3'-phosphate
  modified_base 15: mod_base = OTHER; note = 2'-O-methylcytidine-3'-phosphate
  modified_base 16: mod_base = OTHER; note = 2'-deoxy-2'-fluoroadenosine-3'-phosphate
  modified_base 17: mod_base = OTHER; note = 2'-O-methylcytidine-3'-phosphate
  modified_base 18: mod_base = OTHER; note = 2'-deoxy-2'-fluorouridine-3'-phosphate
  modified_base 19: mod_base = OTHER; note = 2'-O-methylguanosine-3'-phosphate
  modified_base 20: mod_base = OTHER; note = 2'-O-methyluridine-3'-phosphate
  modified_base 21: mod_base = OTHER; note = 2'-O-methyluridine-3'-phosphorothioate
  modified_base 22: mod_base = OTHER; note = 2'-deoxy-2'-fluorouridine-3'-phosphorothioate
  modified_base 23: mod_base = OTHER; note = 2'-O-methyluridine
ttatagagcaagaacactgtttt

SEQ ID NO: 716 - RNA, 23 nt, synthetic construct
  source 1..23: mol_type = other RNA
  modified_base 1: mod_base = OTHER; note = 2'-O-methyluridine-3'-phosphate
  modified_base 2: mod_base = OTHER; note = 2'-deoxy-2'-fluorouridine-3'-phosphate
  modified_base 3: mod_base = OTHER; note = 2'-O-methyladenosine-3'-phosphate
  modified_base 4: mod_base = OTHER; note = 2'-deoxy-2'-fluorouridine-3'-phosphate
  modified_base 5: mod_base = OTHER; note = 2'-O-methyladenosine-3'-phosphate
  modified_base 6: mod_base = OTHER; note = 2'-deoxy-2'-fluoroguanosine-3'-phosphate
  modified_base 7: mod_base = OTHER; note = 2'-O-methyladenosine-3'-phosphate
  modified_base 8: mod_base = OTHER; note = 2'-deoxy-2'-fluoroguanosine-3'-phosphate
  modified_base 9: mod_base = OTHER; note = 2'-O-methylcytidine-3'-phosphate
  modified_base 10: mod_base = OTHER; note = 2'-deoxy-2'-fluoroadenosine-3'-phosphate
  modified_base 11: mod_base = OTHER; note = 2'-O-methyladenosine-3'-phosphate
  modified_base 12: mod_base = OTHER; note = 2'-O-methylguanosine-3'-phosphate
  modified_base 13: mod_base = OTHER; note = 2'-O-methyladenosine-3'-phosphate
  modified_base 14: mod_base = OTHER; note = 2'-deoxy-2'-fluoroadenosine-3'-phosphate
  modified_base 15: mod_base = OTHER; note = 2'-O-methylcytidine-3'-phosphate
  modified_base 16: mod_base = OTHER; note = 2'-deoxy-2'-fluoroadenosine-3'-phosphate
  modified_base 17: mod_base = OTHER; note = 2'-O-methylcytidine-3'-phosphate
  modified_base 18: mod_base = OTHER; note = 2'-deoxy-2'-fluorouridine-3'-phosphate
  modified_base 19: mod_base = OTHER; note = 2'-O-methylguanosine-3'-phosphate
  modified_base 20: mod_base = OTHER; note = 2'-deoxy-2'-fluorouridine-3'-phosphate
  modified_base 21: mod_base = OTHER; note = 2'-O-methyluridine-3'-phosphorothioate
  modified_base 22: mod_base = OTHER; note = 2'-deoxy-2'-fluorouridine-3'-phosphorothioate
  modified_base 23: mod_base = OTHER; note = 2'-deoxy-2'-fluorouridine
ttatagagcaagaacactgtttt

SEQ ID NO: 717 - RNA, 23 nt, synthetic construct
  source 1..23: mol_type = other RNA
  modified_base 1: mod_base = OTHER; note = 2'-O-methyluridine-3'-phosphate
  modified_base 2: mod_base = OTHER; note = 2'-deoxy-2'-fluorouridine-3'-phosphate
  modified_base 3: mod_base = OTHER; note = 2'-O-methyladenosine-3'-phosphate
  modified_base 4: mod_base = OTHER; note = 2'-deoxy-2'-fluorouridine-3'-phosphate
  modified_base 5: mod_base = OTHER; note = 2'-O-methyladenosine-3'-phosphate
  modified_base 6: mod_base = OTHER; note = 2'-deoxy-2'-fluoroguanosine-3'-phosphate
  modified_base 7: mod_base = OTHER; note = 2'-O-methyladenosine-3'-phosphate
  modified_base 8: mod_base = OTHER; note = 2'-deoxy-2'-fluoroguanosine-3'-phosphate
  modified_base 9: mod_base = OTHER; note = 2'-deoxy-2'-fluorocytidine-3'-phosphate
  modified_base 10: mod_base = OTHER; note = 2'-deoxy-2'-fluoroadenosine-3'-phosphate
  modified_base 11: mod_base = OTHER; note = 2'-O-methyladenosine-3'-phosphate
  modified_base 12: mod_base = OTHER; note = 2'-deoxy-2'-fluoroguanosine-3'-phosphate
  modified_base 13: mod_base = OTHER; note = 2'-O-methyladenosine-3'-phosphate
  modified_base 14: mod_base = OTHER; note = 2'-deoxy-2'-fluoroadenosine-3'-phosphate
  modified_base 15: mod_base = OTHER; note = 2'-O-methylcytidine-3'-phosphate
  modified_base 16: mod_base = OTHER; note = 2'-deoxy-2'-fluoroadenosine-3'-phosphate
  modified_base 17: mod_base = OTHER; note = 2'-O-methylcytidine-3'-phosphate
  modified_base 18: mod_base = OTHER; note = 2'-O-methyluridine-3'-phosphate
  modified_base 19: mod_base = OTHER; note = 2'-O-methylguanosine-3'-phosphate
  modified_base 20: mod_base = OTHER; note = 2'-deoxy-2'-fluorouridine-3'-phosphate
  modified_base 21: mod_base = OTHER; note = 2'-O-methyluridine-3'-phosphorothioate
  modified_base 22: mod_base = OTHER; note = 2'-deoxy-2'-fluorouridine-3'-phosphorothioate
  modified_base 23: mod_base = OTHER; note = 2'-O-methyluridine
ttatagagcaagaacactgtttt

SEQ ID NO: 718 - RNA, 23 nt, synthetic construct
  source 1..23: mol_type = other RNA
  modified_base 1: mod_base = OTHER; note = 2'-deoxy-2'-fluorouridine-3'-phosphate
  modified_base 2: mod_base = OTHER; note = 2'-deoxy-2'-fluorouridine-3'-phosphate
  modified_base 3: mod_base = OTHER; note = 2'-O-methyladenosine-3'-phosphate
  modified_base 4: mod_base = OTHER; note = 2'-deoxy-2'-fluorouridine-3'-phosphate
  modified_base 5: mod_base = OTHER; note = 2'-O-methyladenosine-3'-phosphate
  modified_base 6: mod_base = OTHER; note = 2'-deoxy-2'-fluoroguanosine-3'-phosphate
  modified_base 7: mod_base = OTHER; note = 2'-O-methyladenosine-3'-phosphate
  modified_base 8: mod_base = OTHER; note = 2'-deoxy-2'-fluoroguanosine-3'-phosphate
  modified_base 9: mod_base = OTHER; note = 2'-O-methylcytidine-3'-phosphate
  modified_base 10: mod_base = OTHER; note = 2'-deoxy-2'-fluoroadenosine-3'-phosphate
  modified_base 11: mod_base = OTHER; note = 2'-O-methyladenosine-3'-phosphate
  modified_base 12: mod_base = OTHER; note = 2'-deoxy-2'-fluoroguanosine-3'-phosphate
  modified_base 13: mod_base = OTHER; note = 2'-O-methyladenosine-3'-phosphate
  modified_base 14: mod_base = OTHER; note = 2'-deoxy-2'-fluoroadenosine-3'-phosphate
  modified_base 15: mod_base = OTHER; note = 2'-O-methylcytidine-3'-phosphate
  modified_base 16: mod_base = OTHER; note = 2'-O-methyladenosine-3'-phosphate
  modified_base 17: mod_base = OTHER; note = 2'-O-methylcytidine-3'-phosphate
  modified_base 18: mod_base = OTHER; note = 2'-deoxy-2'-fluorouridine-3'-phosphate
  modified_base 19: mod_base = OTHER; note = 2'-O-methylguanosine-3'-phosphate
  modified_base 20: mod_base = OTHER; note = 2'-deoxy-2'-fluorouridine-3'-phosphate
  modified_base 21: mod_base = OTHER; note = 2'-O-methyluridine-3'-phosphorothioate
  modified_base 22: mod_base = OTHER; note = 2'-deoxy-2'-fluorouridine-3'-phosphorothioate
  modified_base 23: mod_base = OTHER; note = 2'-O-methyluridine
ttatagagcaagaacactgtttt

SEQ ID NO: 719 - RNA, 23 nt, synthetic construct
  source 1..23: mol_type = other RNA
  modified_base 1: mod_base = OTHER; note = 2'-O-methyluridine-3'-phosphate
  modified_base 2: mod_base = OTHER; note = 2'-deoxy-2'-fluorouridine-3'-phosphate
  modified_base 3: mod_base = OTHER; note = 2'-O-methyladenosine-3'-phosphate
  modified_base 4: mod_base = OTHER; note = 2'-deoxy-2'-fluorouridine-3'-phosphate
  modified_base 5: mod_base = OTHER; note = 2'-deoxy-2'-fluoroadenosine-3'-phosphate
  modified_base 6: mod_base = OTHER; note = 2'-deoxy-2'-fluoroguanosine-3'-phosphate
  modified_base 7: mod_base = OTHER; note = 2'-O-methyladenosine-3'-phosphate
  modified_base 8: mod_base = OTHER; note = 2'-deoxy-2'-fluoroguanosine-3'-phosphate
  modified_base 9: mod_base = OTHER; note = 2'-O-methylcytidine-3'-phosphate
  modified_base 10: mod_base = OTHER; note = 2'-deoxy-2'-fluoroadenosine-3'-phosphate
  modified_base 11: mod_base = OTHER; note = 2'-O-methyladenosine-3'-phosphate
  modified_base 12: mod_base = OTHER; note = 2'-deoxy-2'-fluoroguanosine-3'-phosphate
  modified_base 13: mod_base = OTHER; note = 2'-O-methyladenosine-3'-phosphate
  modified_base 14: mod_base = OTHER; note = 2'-deoxy-2'-fluoroadenosine-3'-phosphate
  modified_base 15: mod_base = OTHER; note = 2'-O-methylcytidine-3'-phosphate
  modified_base 16: mod_base = OTHER; note = 2'-deoxy-2'-fluoroadenosine-3'-phosphate
  modified_base 17: mod_base = OTHER; note = 2'-O-methylcytidine-3'-phosphate
  modified_base 18: mod_base = OTHER; note = 2'-O-methyluridine-3'-phosphate
  modified_base 19: mod_base = OTHER; note = 2'-O-methylguanosine-3'-phosphate
  modified_base 20: mod_base = OTHER; note = 2'-deoxy-2'-fluorouridine-3'-phosphate
  modified_base 21: mod_base = OTHER; note = 2'-O-methyluridine-3'-phosphorothioate
  modified_base 22: mod_base = OTHER; note = 2'-deoxy-2'-fluorouridine-3'-phosphorothioate
  modified_base 23: mod_base = OTHER; note = 2'-O-methyluridine
ttatagagcaagaacactgtttt

SEQ ID NO: 720 - RNA, 23 nt, synthetic construct
  source 1..23: mol_type = other RNA
  modified_base 1: mod_base = OTHER; note = 2'-O-methyluridine-3'-phosphate
  modified_base 2: mod_base = OTHER; note = 2'-deoxy-2'-fluorouridine-3'-phosphate
  modified_base 3: mod_base = OTHER; note = 2'-O-methyladenosine-3'-phosphate
  modified_base 4: mod_base = OTHER; note = 2'-deoxy-2'-fluorouridine-3'-phosphate
  modified_base 5: mod_base = OTHER; note = 2'-deoxy-2'-fluoroadenosine-3'-phosphate
  modified_base 6: mod_base = OTHER; note = 2'-deoxy-2'-fluoroguanosine-3'-phosphate
  modified_base 7: mod_base = OTHER; note = 2'-O-methyladenosine-3'-phosphate
  modified_base 8: mod_base = OTHER; note = 2'-deoxy-2'-fluoroguanosine-3'-phosphate
  modified_base 9: mod_base = OTHER; note = 2'-O-methylcytidine-3'-phosphate
  modified_base 10: mod_base = OTHER; note = 2'-deoxy-2'-fluoroadenosine-3'-phosphate
  modified_base 11: mod_base = OTHER; note = 2'-O-methyladenosine-3'-phosphate
  modified_base 12: mod_base = OTHER; note = 2'-deoxy-2'-fluoroguanosine-3'-phosphate
  modified_base 13: mod_base = OTHER; note = 2'-O-methyladenosine-3'-phosphate
  modified_base 14: mod_base = OTHER; note = 2'-deoxy-2'-fluoroadenosine-3'-phosphate
  modified_base 15: mod_base = OTHER; note = 2'-O-methylcytidine-3'-phosphate
  modified_base 16: mod_base = OTHER; note = 2'-O-methyladenosine-3'-phosphate
  modified_base 17: mod_base = OTHER; note = 2'-O-methylcytidine-3'-phosphate
  modified_base 18: mod_base = OTHER; note = 2'-deoxy-2'-fluorouridine-3'-phosphate
  modified_base 19: mod_base = OTHER; note = 2'-O-methylguanosine-3'-phosphate
  modified_base 20: mod_base = OTHER; note = 2'-deoxy-2'-fluorouridine-3'-phosphate
  modified_base 21: mod_base = OTHER; note = 2'-O-methyluridine-3'-phosphorothioate
  modified_base 22: mod_base = OTHER; note = 2'-deoxy-2'-fluorouridine-3'-phosphorothioate
  modified_base 23: mod_base = OTHER; note = 2'-O-methyluridine
ttatagagcaagaacactgtttt

SEQ ID NO: 721 - DNA, 23 bp, synthetic construct
  source 1..23: mol_type = other DNA
  modified_base 3: mod_base = OTHER; note = 2'-O-methyladenosine-3'-phosphate
  modified_base 4: mod_base = OTHER; note = 2'-O-methyluridine-3'-phosphate
  modified_base 7: mod_base = OTHER; note = 2'-O-methyladenosine-3'-phosphate
  modified_base 8: mod_base = OTHER; note = 2'-O-methylguanosine-3'-phosphate
  modified_base 11: mod_base = OTHER; note = 2'-O-methyladenosine-3'-phosphate
  modified_base 12: mod_base = OTHER; note = 2'-O-methylguanosine-3'-phosphate
  modified_base 15: mod_base = OTHER; note = 2'-O-methylcytidine-3'-phosphate
  modified_base 16: mod_base = OTHER; note = 2'-O-methyladenosine-3'-phosphate
  modified_base 19: mod_base = OTHER; note = 2'-O-methylguanosine-3'-phosphate
  modified_base 20: mod_base = OTHER; note = 2'-O-methyluridine-3'-phosphate
  modified_base 21: mod_base = OTHER; note = 2'-deoxythymidine-3'-phosphorothioate
  modified_base 22: mod_base = OTHER; note = 2'-deoxythymidine-3'-phosphorothioate
  modified_base 23: mod_base = OTHER; note = 2'-O-methyluridine
  misc_feature 3..4: note = RNA
  misc_feature 7..8: note = RNA
  misc_feature 11..12: note = RNA
  misc_feature 15..16: note = RNA
  misc_feature 19..20: note = RNA
  misc_feature 23: note = RNA
  misc_feature 1..2: note = DNA
  misc_feature 5..6: note = DNA
  misc_feature 9..10: note = DNA
  misc_feature 13..14: note = DNA
  misc_feature 17..18: note = DNA
  misc_feature 21..22: note = DNA
ttatagagcaagaacactgtttt

SEQ ID NO: 722 - RNA, 23 nt, synthetic construct
  source 1..23: mol_type = other RNA
  modified_base 1: mod_base = OTHER; note = 2'-O-methyluridine-3'-phosphate
  modified_base 2: mod_base = OTHER; note = 2'-deoxy-2'-fluorouridine-3'-phosphate
  modified_base 3: mod_base = OTHER; note = 2'-O-methyladenosine-3'-phosphate
  modified_base 4: mod_base = OTHER; note = 2'-deoxy-2'-fluorouridine-3'-phosphate
  modified_base 5: mod_base = OTHER; note = 2'-O-methyladenosine-3'-phosphate
  modified_base 6: mod_base = OTHER; note = 2'-deoxy-2'-fluoroguanosine-3'-phosphate
  modified_base 7: mod_base = OTHER; note = 2'-O-methyladenosine-3'-phosphate
  modified_base 8: mod_base = OTHER; note = 2'-deoxy-2'-fluoroguanosine-3'-phosphate
  modified_base 9: mod_base = OTHER; note = 2'-O-methylcytidine-3'-phosphate
  modified_base 10: mod_base = OTHER; note = 2'-deoxy-2'-fluoroadenosine-3'-phosphate
  modified_base 11: mod_base = OTHER; note = 2'-O-methyladenosine-3'-phosphate
  modified_base 12: mod_base = OTHER; note = 2'-deoxy-2'-fluoroguanosine-3'-phosphate
  modified_base 13: mod_base = OTHER; note = 2'-O-methyladenosine-3'-phosphate
  modified_base 14: mod_base = OTHER; note = 2'-deoxy-2'-fluoroadenosine-3'-phosphate
  modified_base 15: mod_base = OTHER; note = 2'-O-methylcytidine-3'-phosphate
  modified_base 16: mod_base = OTHER; note = 2'-O-methyladenosine-3'-phosphate
  modified_base 17: mod_base = OTHER; note = 2'-O-methylcytidine-3'-phosphate
  modified_base 18: mod_base = OTHER; note = 2'-deoxy-2'-fluorouridine-3'-phosphate
  modified_base 19: mod_base = OTHER; note = 2'-deoxy-2'-fluoroguanosine-3'-phosphate
  modified_base 20: mod_base = OTHER; note = 2'-deoxy-2'-fluorouridine-3'-phosphate
  modified_base 21: mod_base = OTHER; note = 2'-O-methyluridine-3'-phosphorothioate
  modified_base 22: mod_base = OTHER; note = 2'-deoxy-2'-fluorouridine-3'-phosphorothioate
  modified_base 23: mod_base = OTHER; note = 2'-O-methyluridine
ttatagagcaagaacactgtttt

SEQ ID NO: 723 - RNA, 23 nt, synthetic construct
  source 1..23: mol_type = other RNA
  modified_base 1: mod_base = OTHER; note = 2'-O-methyluridine-3'-phosphate
  modified_base 2: mod_base = OTHER; note = 2'-deoxy-2'-fluorouridine-3'-phosphate
  modified_base 3: mod_base = OTHER; note = 2'-deoxy-2'-fluoroadenosine-3'-phosphate
  modified_base 4: mod_base = OTHER; note = 2'-deoxy-2'-fluorouridine-3'-phosphate
  modified_base 5: mod_base = OTHER; note = 2'-O-methyladenosine-3'-phosphate
  modified_base 6: mod_base = OTHER; note = 2'-deoxy-2'-fluoroguanosine-3'-phosphate
  modified_base 7: mod_base = OTHER; note = 2'-O-methyladenosine-3'-phosphate
  modified_base 8: mod_base = OTHER; note = 2'-deoxy-2'-fluoroguanosine-3'-phosphate
  modified_base 9: mod_base = OTHER; note = 2'-O-methylcytidine-3'-phosphate
  modified_base 10: mod_base = OTHER; note = 2'-deoxy-2'-fluoroadenosine-3'-phosphate
  modified_base 11: mod_base = OTHER; note = 2'-O-methyladenosine-3'-phosphate
  modified_base 12: mod_base = OTHER; note = 2'-deoxy-2'-fluoroguanosine-3'-phosphate
  modified_base 13: mod_base = OTHER; note = 2'-O-methyladenosine-3'-phosphate
  modified_base 14: mod_base = OTHER; note = 2'-deoxy-2'-fluoroadenosine-3'-phosphate
  modified_base 15: mod_base = OTHER; note = 2'-O-methylcytidine-3'-phosphate
  modified_base 16: mod_base = OTHER; note = 2'-O-methyladenosine-3'-phosphate
  modified_base 17: mod_base = OTHER; note = 2'-O-methylcytidine-3'-phosphate
  modified_base 18: mod_base = OTHER; note = 2'-deoxy-2'-fluorouridine-3'-phosphate
  modified_base 19: mod_base = OTHER; note = 2'-O-methylguanosine-3'-phosphate
  modified_base 20: mod_base = OTHER; note = 2'-deoxy-2'-fluorouridine-3'-phosphate
  modified_base 21: mod_base = OTHER; note = 2'-O-methyluridine-3'-phosphorothioate
  modified_base 22: mod_base = OTHER; note = 2'-deoxy-2'-fluorouridine-3'-phosphorothioate
  modified_base 23: mod_base = OTHER; note = 2'-O-methyluridine
ttatagagcaagaacactgtttt

SEQ ID NO: 724 - RNA, 23 nt, synthetic construct
  source 1..23: mol_type = other RNA
  modified_base 1: mod_base = OTHER; note = 2'-O-methyluridine-3'-phosphate
  modified_base 2: mod_base = OTHER; note = 2'-deoxy-2'-fluorouridine-3'-phosphate
  modified_base 3: mod_base = OTHER; note = 2'-O-methyladenosine-3'-phosphate
  modified_base 4: mod_base = OTHER; note = 2'-deoxy-2'-fluorouridine-3'-phosphate
  modified_base 5: mod_base = OTHER; note = 2'-O-methyladenosine-3'-phosphate
  modified_base 6: mod_base = OTHER; note = 2'-deoxy-2'-fluoroguanosine-3'-phosphate
  modified_base 7: mod_base = OTHER; note = 2'-O-methyladenosine-3'-phosphate
  modified_base 8: mod_base = OTHER; note = 2'-deoxy-2'-fluoroguanosine-3'-phosphate
  modified_base 9: mod_base = OTHER; note = 2'-O-methylcytidine-3'-phosphate
  modified_base 10: mod_base = OTHER; note = 2'-deoxy-2'-fluoroadenosine-3'-phosphate
  modified_base 11: mod_base = OTHER; note = 2'-O-methyladenosine-3'-phosphate
  modified_base 12: mod_base = OTHER; note = 2'-deoxy-2'-fluoroguanosine-3'-phosphate
  modified_base 13: mod_base = OTHER; note = 2'-O-methyladenosine-3'-phosphate
  modified_base 14: mod_base = OTHER; note = 2'-deoxy-2'-fluoroadenosine-3'-phosphate
  modified_base 15: mod_base = OTHER; note = 2'-O-methylcytidine-3'-phosphate
  modified_base 16: mod_base = OTHER; note = 2'-deoxy-2'-fluoroadenosine-3'-phosphate
  modified_base 17: mod_base = OTHER; note = 2'-deoxy-2'-fluorocytidine-3'-phosphate
  modified_base 18: mod_base = OTHER; note = 2'-deoxy-2'-fluorouridine-3'-phosphate
  modified_base 19: mod_base = OTHER; note = 2'-O-methylguanosine-3'-phosphate
  modified_base 20: mod_base = OTHER; note = 2'-deoxy-2'-fluorouridine-3'-phosphate
  modified_base 21: mod_base = OTHER; note = 2'-O-methyluridine-3'-phosphorothioate
  modified_base 22: mod_base = OTHER; note = 2'-O-methyluridine-3'-phosphorothioate
  modified_base 23: mod_base = OTHER; note = 2'-O-methyluridine
ttatagagcaagaacactgtttt

SEQ ID NO: 725 - RNA, 23 nt, synthetic construct
  source 1..23: mol_type = other RNA
  modified_base 1: mod_base = OTHER; note = 2'-O-methyluridine-3'-phosphate
  modified_base 2: mod_base = OTHER; note = 2'-deoxy-2'-fluorouridine-3'-phosphate
  modified_base 3: mod_base = OTHER; note = 2'-deoxy-2'-fluoroadenosine-3'-phosphate
  modified_base 4: mod_base = OTHER; note = 2'-deoxy-2'-fluorouridine-3'-phosphate
  modified_base 5: mod_base = OTHER; note = 2'-O-methyladenosine-3'-phosphate
  modified_base 6: mod_base = OTHER; note = 2'-deoxy-2'-fluoroguanosine-3'-phosphate
  modified_base 7: mod_base = OTHER; note = 2'-O-methyladenosine-3'-phosphate
  modified_base 8: mod_base = OTHER; note = 2'-deoxy-2'-fluoroguanosine-3'-phosphate
  modified_base 9: mod_base = OTHER; note = 2'-O-methylcytidine-3'-phosphate
  modified_base 10: mod_base = OTHER; note = 2'-O-methyladenosine-3'-phosphate
  modified_base 11: mod_base = OTHER; note = 2'-O-methyladenosine-3'-phosphate
  modified_base 12: mod_base = OTHER; note = 2'-deoxy-2'-fluoroguanosine-3'-phosphate
  modified_base 13: mod_base = OTHER; note = 2'-O-methyladenosine-3'-phosphate
  modified_base 14: mod_base = OTHER; note = 2'-deoxy-2'-fluoroadenosine-3'-phosphate
  modified_base 15: mod_base = OTHER; note = 2'-O-methylcytidine-3'-phosphate
  modified_base 16: mod_base = OTHER; note = 2'-deoxy-2'-fluoroadenosine-3'-phosphate
  modified_base 17: mod_base = OTHER; note = 2'-O-methylcytidine-3'-phosphate
  modified_base 18: mod_base = OTHER; note = 2'-deoxy-2'-fluorouridine-3'-phosphate
  modified_base 19: mod_base = OTHER; note = 2'-O-methylguanosine-3'-phosphate
  modified_base 20: mod_base = OTHER; note = 2'-deoxy-2'-fluorouridine-3'-phosphate
  modified_base 21: mod_base = OTHER; note = 2'-O-methyluridine-3'-phosphorothioate
  modified_base 22: mod_base = OTHER; note = 2'-deoxy-2'-fluorouridine-3'-phosphorothioate
  modified_base 23: mod_base = OTHER; note = 2'-O-methyluridine
ttatagagcaagaacactgtttt

SEQ ID NO: 726 - RNA, 23 nt, synthetic construct
  source 1..23: mol_type = other RNA
  modified_base 1: mod_base = OTHER; note = 2'-O-methyluridine-3'-phosphate
  modified_base 2: mod_base = OTHER; note = 2'-deoxy-2'-fluorouridine-3'-phosphate
  modified_base 3: mod_base = OTHER; note = 2'-O-methyladenosine-3'-phosphate
  modified_base 4: mod_base = OTHER; note = 2'-deoxy-2'-fluorouridine-3'-phosphate
  modified_base 5: mod_base = OTHER; note = 2'-O-methyladenosine-3'-phosphate
  modified_base 6: mod_base = OTHER; note = 2'-deoxy-2'-fluoroguanosine-3'-phosphate
  modified_base 7: mod_base = OTHER; note = 2'-O-methyladenosine-3'-phosphate
  modified_base 8: mod_base = OTHER; note = 2'-deoxy-2'-fluoroguanosine-3'-phosphate
  modified_base 9: mod_base = OTHER; note = 2'-deoxy-2'-fluorocytidine-3'-phosphate
  modified_base 10: mod_base = OTHER; note = 2'-deoxy-2'-fluoroadenosine-3'-phosphate
  modified_base 11: mod_base = OTHER; note = 2'-O-methyladenosine-3'-phosphate
  modified_base 12: mod_base = OTHER; note = 2'-deoxy-2'-fluoroguanosine-3'-phosphate
  modified_base 13: mod_base = OTHER; note = 2'-O-methyladenosine-3'-phosphate
  modified_base 14: mod_base = OTHER; note = 2'-deoxy-2'-fluoroadenosine-3'-phosphate
  modified_base 15: mod_base = OTHER; note = 2'-O-methylcytidine-3'-phosphate
  modified_base 16: mod_base = OTHER; note = 2'-O-methyladenosine-3'-phosphate
  modified_base 17: mod_base = OTHER; note = 2'-O-methylcytidine-3'-phosphate
  modified_base 18: mod_base = OTHER; note = 2'-deoxy-2'-fluorouridine-3'-phosphate
  modified_base 19: mod_base = OTHER; note = 2'-O-methylguanosine-3'-phosphate
  modified_base 20: mod_base = OTHER; note = 2'-deoxy-2'-fluorouridine-3'-phosphate
  modified_base 21: mod_base = OTHER; note = 2'-O-methyluridine-3'-phosphorothioate
  modified_base 22: mod_base = OTHER; note = 2'-deoxy-2'-fluorouridine-3'-phosphorothioate
  modified_base 23: mod_base = OTHER; note = 2'-O-methyluridine
ttatagagcaagaacactgtttt

SEQ ID NO: 727 - RNA, 23 nt, synthetic construct
  source 1..23: mol_type = other RNA
  modified_base 1: mod_base = OTHER; note = 2'-O-methyluridine-3'-phosphate
  modified_base 2: mod_base = OTHER; note = 2'-deoxy-2'-fluorouridine-3'-phosphate
  modified_base 3: mod_base = OTHER; note = 2'-O-methyladenosine-3'-phosphate
  modified_base 4: mod_base = OTHER; note = 2'-deoxy-2'-fluorouridine-3'-phosphate
  modified_base 5: mod_base = OTHER; note = 2'-O-methyladenosine-3'-phosphate
  modified_base 6: mod_base = OTHER; note = 2'-deoxy-2'-fluoroguanosine-3'-phosphate
  modified_base 7: mod_base = OTHER; note = 2'-O-methyladenosine-3'-phosphate
  modified_base 8: mod_base = OTHER; note = 2'-deoxy-2'-fluoroguanosine-3'-phosphate
  modified_base 9: mod_base = OTHER; note = 2'-O-methylcytidine-3'-phosphate
  modified_base 10: mod_base = OTHER; note = 2'-O-methyladenosine-3'-phosphate
  modified_base 11: mod_base = OTHER; note = 2'-O-methyladenosine-3'-phosphate
  modified_base 12: mod_base = OTHER; note = 2'-deoxy-2'-fluoroguanosine-3'-phosphate
  modified_base 13: mod_base = OTHER; note = 2'-O-methyladenosine-3'-phosphate
  modified_base 14: mod_base = OTHER; note = 2'-deoxy-2'-fluoroadenosine-3'-phosphate
  modified_base 15: mod_base = OTHER; note = 2'-deoxy-2'-fluorocytidine-3'-phosphate
  modified_base 16: mod_base = OTHER; note = 2'-deoxy-2'-fluoroadenosine-3'-phosphate
  modified_base 17: mod_base = OTHER; note = 2'-O-methylcytidine-3'-phosphate
  modified_base 18: mod_base = OTHER; note = 2'-deoxy-2'-fluorouridine-3'-phosphate
  modified_base 19: mod_base = OTHER; note = 2'-O-methylguanosine-3'-phosphate
  modified_base 20: mod_base = OTHER; note = 2'-deoxy-2'-fluorouridine-3'-phosphate
  modified_base 21: mod_base = OTHER; note = 2'-O-methyluridine-3'-phosphorothioate
  modified_base 22: mod_base = OTHER; note = 2'-deoxy-2'-fluorouridine-3'-phosphorothioate
  modified_base 23: mod_base = OTHER; note = 2'-O-methyluridine
ttatagagcaagaacactgtttt

SEQ ID NO: 728 - RNA, 23 nt, synthetic construct
  source 1..23: mol_type = other RNA
  modified_base 1: mod_base = OTHER; note = 2'-O-methyluridine-3'-phosphate
  modified_base 2: mod_base = OTHER; note = 2'-deoxy-2'-fluorouridine-3'-phosphate
  modified_base 3: mod_base = OTHER; note = 2'-O-methyladenosine-3'-phosphate
  modified_base 4: mod_base = OTHER; note = 2'-deoxy-2'-fluorouridine-3'-phosphate
  modified_base 5: mod_base = OTHER; note = 2'-O-methyladenosine-3'-phosphate
  modified_base 6: mod_base = OTHER; note = 2'-deoxy-2'-fluoroguanosine-3'-phosphate
  modified_base 7: mod_base = OTHER; note = 2'-O-methyladenosine-3'-phosphate
  modified_base 8: mod_base = OTHER; note = 2'-deoxy-2'-fluoroguanosine-3'-phosphate
  modified_base 9: mod_base = OTHER; note = 2'-O-methylcytidine-3'-phosphate
  modified_base 10: mod_base = OTHER; note = 2'-deoxy-2'-fluoroadenosine-3'-phosphate
  modified_base 11: mod_base = OTHER; note = 2'-O-methyladenosine-3'-phosphate
  modified_base 12: mod_base = OTHER; note = 2'-deoxy-2'-fluoroguanosine-3'-phosphate
  modified_base 13: mod_base = OTHER; note = 2'-O-methyladenosine-3'-phosphate
  modified_base 14: mod_base = OTHER; note = 2'-deoxy-2'-fluoroadenosine-3'-phosphate
  modified_base 15: mod_base = OTHER; note = 2'-O-methylcytidine-3'-phosphate
  modified_base 16: mod_base = OTHER; note = 2'-deoxy-2'-fluoroadenosine-3'-phosphate
  modified_base 17: mod_base = OTHER; note = 2'-deoxy-2'-fluorocytidine-3'-phosphate
  modified_base 18: mod_base = OTHER; note = 2'-deoxy-2'-fluorouridine-3'-phosphate
  modified_base 19: mod_base = OTHER; note = 2'-O-methylguanosine-3'-phosphate
  modified_base 20: mod_base = OTHER; note = 2'-O-methyluridine-3'-phosphate
  modified_base 21: mod_base = OTHER; note = 2'-O-methyluridine-3'-phosphorothioate
  modified_base 22: mod_base = OTHER; note = 2'-deoxy-2'-fluorouridine-3'-phosphorothioate
  modified_base 23: mod_base = OTHER; note = 2'-O-methyluridine
ttatagagcaagaacactgtttt

SEQ ID NO: 729 - RNA, 23 nt, synthetic construct
  source 1..23: mol_type = other RNA
  modified_base 1: mod_base = OTHER; note = 2'-O-methyluridine-3'-phosphate
  modified_base 2: mod_base = OTHER; note = 2'-deoxy-2'-fluorouridine-3'-phosphate
  modified_base 3: mod_base = OTHER; note = 2'-O-methyladenosine-3'-phosphate
  modified_base 4: mod_base = OTHER; note = 2'-deoxy-2'-fluorouridine-3'-phosphate
  modified_base 5: mod_base = OTHER; note = 2'-O-methyladenosine-3'-phosphate
  modified_base 6: mod_base = OTHER; note = 2'-deoxy-2'-fluoroguanosine-3'-phosphate
  modified_base 7: mod_base = OTHER; note = 2'-O-methyladenosine-3'-phosphate
  modified_base 8: mod_base = OTHER; note = 2'-deoxy-2'-fluoroguanosine-3'-phosphate
  modified_base 9: mod_base = OTHER; note = 2'-O-methylcytidine-3'-phosphate
  modified_base 10: mod_base = OTHER; note = 2'-deoxy-2'-fluoroadenosine-3'-phosphate
  modified_base 11: mod_base = OTHER; note = 2'-O-methyladenosine-3'-phosphate
  modified_base 12: mod_base = OTHER; note = 2'-deoxy-2'-fluoroguanosine-3'-phosphate
  modified_base 13: mod_base = OTHER; note = 2'-deoxy-2'-fluoroadenosine-3'-phosphate
  modified_base 14: mod_base = OTHER; note = 2'-deoxy-2'-fluoroadenosine-3'-phosphate
  modified_base 15: mod_base = OTHER; note = 2'-O-methylcytidine-3'-phosphate
  modified_base 16: mod_base = OTHER; note = 2'-deoxy-2'-fluoroadenosine-3'-phosphate
  modified_base 17: mod_base = OTHER; note = 2'-O-methylcytidine-3'-phosphate
  modified_base 18: mod_base = OTHER; note = 2'-deoxy-2'-fluorouridine-3'-phosphate
  modified_base 19: mod_base = OTHER; note = 2'-O-methylguanosine-3'-phosphate
  modified_base 20: mod_base = OTHER; note = 2'-deoxy-2'-fluorouridine-3'-phosphate
  modified_base 21: mod_base = OTHER; note = 2'-O-methyluridine-3'-phosphorothioate
  modified_base 22: mod_base = OTHER; note = 2'-O-methyluridine-3'-phosphorothioate
  modified_base 23: mod_base = OTHER; note = 2'-O-methyluridine
ttatagagcaagaacactgtttt

SEQ ID NO: 730 - DNA, 23 bp, synthetic construct
  source 1..23: mol_type = other DNA
  modified_base 1: mod_base = OTHER; note = 2'-O-methyluridine-3'-phosphate
  modified_base 3: mod_base = OTHER; note = 2'-O-methyladenosine-3'-phosphate
  modified_base 6: mod_base = OTHER; note = 2'-O-methylguanosine-3'-phosphate
  modified_base 7: mod_base = OTHER; note = 2'-O-methyladenosine-3'-phosphate
  modified_base 10: mod_base = OTHER; note = 2'-O-methyladenosine-3'-phosphate
  modified_base 11: mod_base = OTHER; note = 2'-O-methyladenosine-3'-phosphate
  modified_base 14: mod_base = OTHER; note = 2'-O-methyladenosine-3'-phosphate
  modified_base 15: mod_base = OTHER; note = 2'-O-methylcytidine-3'-phosphate
  modified_base 18: mod_base = OTHER; note = 2'-O-methyluridine-3'-phosphate
  modified_base 19: mod_base = OTHER; note = 2'-O-methylguanosine-3'-phosphate
  modified_base 21: mod_base = OTHER; note = 2'-deoxythymidine-3'-phosphorothioate
  modified_base 22: mod_base = OTHER; note = 2'-O-methyluridine-3'-phosphorothioate
  modified_base 23: mod_base = OTHER; note = 2'-O-methyluridine
  misc_feature 1: note = RNA
  misc_feature 3: note = RNA
  misc_feature 6..7: note = RNA
  misc_feature 10..11: note = RNA
  misc_feature 14..15: note = RNA
  misc_feature 18..19: note = RNA
  misc_feature 22..23: note = RNA
  misc_feature 2: note = DNA
  misc_feature 4..5: note = DNA
  misc_feature 8..9: note = DNA
  misc_feature 12..13: note = DNA
  misc_feature 16..17: note = DNA
  misc_feature 20..21: note = DNA
ttatagagcaagaacactgtttt

SEQ ID NO: 731 - DNA, 23 bp, synthetic construct
  source 1..23: mol_type = other DNA
  modified_base 2: mod_base = OTHER; note = uridine-3'-phosphate
  modified_base 4: mod_base = OTHER; note = uridine-3'-phosphate
  modified_base 6: mod_base = OTHER; note = 2'-deoxy-2'-fluoroguanosine-3'-phosphate
  modified_base 7: mod_base = OTHER; note = 2'-O-methyladenosine-3'-phosphate
  modified_base 8: mod_base = OTHER; note = 2'-deoxy-2'-fluoroguanosine-3'-phosphate
  modified_base 9: mod_base = OTHER; note = 2'-O-methylcytidine-3'-phosphate
  modified_base 10: mod_base = OTHER; note = 2'-deoxy-2'-fluoroadenosine-3'-phosphate
  modified_base 11: mod_base = OTHER; note = 2'-O-methyladenosine-3'-phosphate
  modified_base 12: mod_base = OTHER; note = 2'-deoxy-2'-fluoroguanosine-3'-phosphate
  modified_base 13: mod_base = OTHER; note = 2'-O-methyladenosine-3'-phosphate
  modified_base 14: mod_base = OTHER; note = 2'-deoxy-2'-fluoroadenosine-3'-phosphate
  modified_base 15: mod_base = OTHER; note = 2'-deoxy-2'-fluorocytidine-3'-phosphate
  modified_base 16: mod_base = OTHER; note = 2'-deoxy-2'-fluoroadenosine-3'-phosphate
  modified_base 17: mod_base = OTHER; note = 2'-O-methylcytidine-3'-phosphate
  modified_base 18: mod_base = OTHER; note = 2'-deoxy-2'-fluorouridine-3'-phosphate
  modified_base 19: mod_base = OTHER; note = 2'-deoxy-2'-fluoroguanosine-3'-phosphate
  modified_base 20: mod_base = OTHER; note = 2'-deoxy-2'-fluorouridine-3'-phosphate
  modified_base 21: mod_base = OTHER; note = 2'-O-methyluridine-3'-phosphorothioate
  modified_base 22: mod_base = OTHER; note = 2'-deoxy-2'-fluorouridine-3'-phosphorothioate
  modified_base 23: mod_base = OTHER; note = 2'-O-methyluridine
  misc_feature 2: note = RNA
  misc_feature 4: note = RNA
  misc_feature 6..23: note = RNA
  misc_feature 1: note = DNA
  misc_feature 5: note = DNA
ttatagagcaagaacactgtttt

SEQ ID NO: 732 - DNA, 23 bp, synthetic construct
  source 1..23: mol_type = other DNA
  modified_base 2: mod_base = OTHER; note = uridine-3'-phosphate
  modified_base 4: mod_base = OTHER; note = uridine-3'-phosphate
  modified_base 6: mod_base = OTHER; note = 2'-deoxy-2'-fluoroguanosine-3'-phosphate
  modified_base 7: mod_base = OTHER; note = 2'-O-methyladenosine-3'-phosphate
  modified_base 8: mod_base = OTHER; note = 2'-deoxy-2'-fluoroguanosine-3'-phosphate
  modified_base 9: mod_base = OTHER; note = 2'-O-methylcytidine-3'-phosphate
  modified_base 10: mod_base = OTHER; note = 2'-deoxy-2'-fluoroadenosine-3'-phosphate
  modified_base 11: mod_base = OTHER; note = 2'-O-methyladenosine-3'-phosphate
  modified_base 12: mod_base = OTHER; note = 2'-deoxy-2'-fluoroguanosine-3'-phosphate
  modified_base 13: mod_base = OTHER; note = 2'-O-methyladenosine-3'-phosphate
  modified_base 14: mod_base = OTHER; note = 2'-deoxy-2'-fluoroadenosine-3'-phosphate
  modified_base 15: mod_base = OTHER; note = 2'-deoxy-2'-fluorocytidine-3'-phosphate
  modified_base 16: mod_base = OTHER; note = 2'-deoxy-2'-fluoroadenosine-3'-phosphate
  modified_base 17: mod_base = OTHER; note = 2'-O-methylcytidine-3'-phosphate
  modified_base 18: mod_base = OTHER; note = 2'-deoxy-2'-fluorouridine-3'-phosphate
  modified_base 19: mod_base = OTHER; note = 2'-deoxy-2'-fluoroguanosine-3'-phosphate
  modified_base 20: mod_base = OTHER; note = 2'-deoxy-2'-fluorouridine-3'-phosphate
  modified_base 21: mod_base = OTHER; note = 2'-O-methyluridine-3'-phosphorothioate
  modified_base 22: mod_base = OTHER; note = 2'-deoxy-2'-fluorouridine-3'-phosphorothioate
  modified_base 23: mod_base = OTHER; note = 2'-O-methyluridine
  misc_feature 2: note = RNA
  misc_feature 4: note = RNA
  misc_feature 6..23: note = RNA
  misc_feature 1: note = DNA
  misc_feature 5: note = DNA
ttatagagcaagaacactgtttt

SEQ ID NO: 733 - DNA, 23 bp, synthetic construct
  source 1..23: mol_type = other DNA
  modified_base 2: mod_base = OTHER; note = uridine-3'-phosphate
  modified_base 4: mod_base = OTHER; note = uridine-3'-phosphate
  modified_base 6: mod_base = OTHER; note = 2'-O-methylguanosine-3'-phosphate
  modified_base 8: mod_base = OTHER; note = 2'-deoxy-2'-fluoroguanosine-3'-phosphate
  modified_base 9: mod_base = OTHER; note = 2'-O-methylcytidine-3'-phosphate
  modified_base 10: mod_base = OTHER; note = 2'-deoxy-2'-fluoroadenosine-3'-phosphate
  modified_base 11: mod_base = OTHER; note = 2'-O-methyladenosine-3'-phosphate
  modified_base 12: mod_base = OTHER; note = 2'-deoxy-2'-fluoroguanosine-3'-phosphate
  modified_base 13: mod_base = OTHER; note = 2'-O-methyladenosine-3'-phosphate
  modified_base 14: mod_base = OTHER; note = 2'-deoxy-2'-fluoroadenosine-3'-phosphate
  modified_base 15: mod_base = OTHER; note = 2'-O-methylcytidine-3'-phosphate
  modified_base 16: mod_base = OTHER; note = 2'-deoxy-2'-fluoroadenosine-3'-phosphate
  modified_base 17: mod_base = OTHER; note = 2'-O-methylcytidine-3'-phosphate
  modified_base 18: mod_base = OTHER; note = 2'-deoxy-2'-fluorouridine-3'-phosphate
  modified_base 19: mod_base = OTHER; note = 2'-O-methylguanosine-3'-phosphate
  modified_base 20: mod_base = OTHER; note = 2'-deoxy-2'-fluorouridine-3'-phosphate
  modified_base 21: mod_base = OTHER; note = 2'-O-methyluridine-3'-phosphorothioate
  modified_base 22: mod_base = OTHER; note = 2'-deoxy-2'-fluorouridine-3'-phosphorothioate
  modified_base 23: mod_base = OTHER; note = 2'-O-methyluridine
  misc_feature 2: note = RNA
  misc_feature 4: note = RNA
  misc_feature 6: note = RNA
  misc_feature 8..23: note = RNA
  misc_feature 1: note = DNA
  misc_feature 5: note = DNA
  misc_feature 7: note = DNA
ttatagagcaagaacactgtttt

SEQ ID NO: 734 - DNA, 23 bp, synthetic construct
  source 1..23: mol_type = other DNA
  modified_base 2: mod_base = OTHER; note = uridine-3'-phosphate
  modified_base 4: mod_base = OTHER; note = uridine-3'-phosphate
  modified_base 6: mod_base = OTHER; note = 2'-O-methylguanosine-3'-phosphate
  modified_base 8: mod_base = OTHER; note = 2'-deoxy-2'-fluoroguanosine-3'-phosphate
  modified_base 10: mod_base = OTHER; note = 2'-deoxy-2'-fluoroadenosine-3'-phosphate
  modified_base 11: mod_base = OTHER; note = 2'-O-methyladenosine-3'-phosphate
  modified_base 12: mod_base = OTHER; note = 2'-deoxy-2'-fluoroguanosine-3'-phosphate
  modified_base 13: mod_base = OTHER; note = 2'-O-methyladenosine-3'-phosphate
  modified_base 14: mod_base = OTHER; note = 2'-deoxy-2'-fluoroadenosine-3'-phosphate
  modified_base 15: mod_base = OTHER; note = 2'-O-methylcytidine-3'-phosphate
  modified_base 16: mod_base = OTHER; note = 2'-deoxy-2'-fluoroadenosine-3'-phosphate
  modified_base 17: mod_base = OTHER; note = 2'-O-methylcytidine-3'-phosphate
  modified_base 18: mod_base = OTHER; note = 2'-deoxy-2'-fluorouridine-3'-phosphate
  modified_base 19: mod_base = OTHER; note = 2'-O-methylguanosine-3'-phosphate
  modified_base 20: mod_base = OTHER; note = 2'-deoxy-2'-fluorouridine-3'-phosphate
  modified_base 21: mod_base = OTHER; note = 2'-O-methyluridine-3'-phosphorothioate
  modified_base 22: mod_base = OTHER; note = 2'-deoxy-2'-fluorouridine-3'-phosphorothioate
  modified_base 23: mod_base = OTHER; note = 2'-O-methyluridine
  misc_feature 2: note = RNA
  misc_feature 4: note = RNA
  misc_feature 6: note = RNA
  misc_feature 8: note = RNA
  misc_feature 10..23: note = RNA
  misc_feature 1: note = DNA
  misc_feature 5: note = DNA
  misc_feature 7: note = DNA
  misc_feature 9: note = DNA
ttatagagcaagaacactgtttt

SEQ ID NO: 735 - DNA, 23 bp, synthetic construct
  source 1..23: mol_type = other DNA
  modified_base 2: mod_base = OTHER; note = uridine-3'-phosphate
  modified_base 4: mod_base = OTHER; note = 2'-O-methyluridine-3'-phosphate
  modified_base 6: mod_base = OTHER; note = 2'-O-methylguanosine-3'-phosphate
  modified_base 8: mod_base = OTHER; note = 2'-deoxy-2'-fluoroguanosine-3'-phosphate
  modified_base 10: mod_base = OTHER; note = 2'-deoxy-2'-fluoroadenosine-3'-phosphate
  modified_base 11: mod_base = OTHER; note = 2'-O-methyladenosine-3'-phosphate
  modified_base 12: mod_base = OTHER; note = 2'-deoxy-2'-fluoroguanosine-3'-phosphate
  modified_base 13: mod_base = OTHER; note = 2'-O-methyladenosine-3'-phosphate
  modified_base 14: mod_base = OTHER; note = 2'-deoxy-2'-fluoroadenosine-3'-phosphate
  modified_base 15: mod_base = OTHER; note = 2'-O-methylcytidine-3'-phosphate
  modified_base 16: mod_base = OTHER; note = 2'-deoxy-2'-fluoroadenosine-3'-phosphate
  modified_base 17: mod_base = OTHER; note = 2'-O-methylcytidine-3'-phosphate
  modified_base 18: mod_base = OTHER; note = 2'-deoxy-2'-fluoroadenosine-3'-phosphate
  modified_base 19: mod_base = OTHER; note = 2'-O-methylguanosine-3'-phosphate
  modified_base 20: mod_base = OTHER; note = 2'-deoxy-2'-fluorouridine-3'-phosphate
  modified_base 21: mod_base = OTHER; note = 2'-O-methyluridine-3'-phosphorothioate
  modified_base 22: mod_base = OTHER; note = 2'-deoxy-2'-fluorouridine-3'-phosphorothioate
  modified_base 23: mod_base = OTHER; note = 2'-O-methyluridine
  misc_feature 2: note = RNA
  misc_feature 4: note = RNA
  misc_feature 6: note = RNA
  misc_feature 8: note = RNA
  misc_feature 10..23: note = RNA
  misc_feature 1: note = DNA
  misc_feature 5: note = DNA
  misc_feature 7: note = DNA
  misc_feature 9: note = DNA
ttatagagcaagaacacagtttt

SEQ ID NO: 736 - DNA, 23 bp, synthetic construct
  source 1..23: mol_type = other DNA
  modified_base 5: mod_base = OTHER; note = 2'-O-methyladenosine-3'-phosphate
  modified_base 6: mod_base = OTHER; note = 2'-deoxy-2'-fluoroguanosine-3'-phosphate
  modified_base 7: mod_base = OTHER; note = 2'-O-methyladenosine-3'-phosphate
  modified_base 8: mod_base = OTHER; note = 2'-deoxy-2'-fluoroguanosine-3'-phosphate
  modified_base 9: mod_base = OTHER; note = 2'-O-methylcytidine-3'-phosphate
  modified_base 10: mod_base = OTHER; note = 2'-deoxy-2'-fluoroadenosine-3'-phosphate
  modified_base 11: mod_base = OTHER; note = 2'-O-methyladenosine-3'-phosphate
  modified_base 12: mod_base = OTHER; note = 2'-deoxy-2'-fluoroguanosine-3'-phosphate
  modified_base 13: mod_base = OTHER; note = 2'-O-methyladenosine-3'-phosphate
  modified_base 14: mod_base = OTHER; note = 2'-deoxy-2'-fluoroadenosine-3'-phosphate
  modified_base 15: mod_base = OTHER; note = 2'-O-methylcytidine-3'-phosphate
  modified_base 16: mod_base = OTHER; note = 2'-deoxy-2'-fluoroadenosine-3'-phosphate
  modified_base 17: mod_base = OTHER; note = 2'-O-methylcytidine-3'-phosphate
  modified_base 18: mod_base = OTHER; note = 2'-deoxy-2'-fluoroadenosine-3'-phosphate
  modified_base 19: mod_base = OTHER; note = 2'-O-methylguanosine-3'-phosphate
  modified_base 20: mod_base = OTHER; note = 2'-deoxy-2'-fluorouridine-3'-phosphate
  modified_base 21: mod_base = OTHER; note = 2'-O-methyluridine-3'-phosphorothioate
  modified_base 22: mod_base = OTHER; note = 2'-deoxy-2'-fluorouridine-3'-phosphorothioate
  modified_base 23: mod_base = OTHER; note = 2'-O-methyluridine
  misc_feature 5..23: note = RNA
  misc_feature 1..4: note = DNA
ttatagagcaagaacacagtttt

SEQ ID NO: 737 - DNA, 23 bp, synthetic construct
  source 1..23: mol_type = other DNA
  modified_base 2: mod_base = OTHER; note = uridine-3'-phosphate
  modified_base 4: mod_base = OTHER; note = uridine-3'-phosphate
  modified_base 6: mod_base = OTHER; note = 2'-O-methylguanosine-3'-phosphate
  modified_base 8: mod_base = OTHER; note = 2'-deoxy-2'-fluoroguanosine-3'-phosphate
  modified_base 9: mod_base = OTHER; note = 2'-O-methylcytidine-3'-phosphate
  modified_base 10: mod_base = OTHER; note = 2'-deoxy-2'-fluoroadenosine-3'-phosphate
  modified_base 11: mod_base = OTHER; note = 2'-O-methyladenosine-3'-phosphate
  modified_base 12: mod_base = OTHER; note = 2'-deoxy-2'-fluoroguanosine-3'-phosphate
  modified_base 13: mod_base = OTHER; note = 2'-O-methyladenosine-3'-phosphate
  modified_base 14: mod_base = OTHER; note = 2'-deoxy-2'-fluoroadenosine-3'-phosphate
  modified_base 15: mod_base = OTHER; note = 2'-O-methylcytidine-3'-phosphate
  modified_base 16: mod_base = OTHER; note = 2'-deoxy-2'-fluoroadenosine-3'-phosphate
  modified_base 17: mod_base = OTHER; note = 2'-O-methylcytidine-3'-phosphate
  modified_base 18: mod_base = OTHER; note = 2'-deoxy-2'-fluorouridine-3'-phosphate
  modified_base 19: mod_base = OTHER; note = 2'-O-methylguanosine-3'-phosphate
  modified_base 20: mod_base = OTHER; note = 2'-deoxy-2'-fluorouridine-3'-phosphate
  modified_base 21: mod_base = OTHER; note = 2'-O-methyluridine-3'-phosphorothioate
  modified_base 22: mod_base = OTHER; note = 2'-deoxy-2'-fluorouridine-3'-phosphorothioate
  modified_base 23: mod_base = OTHER; note = 2'-O-methyluridine
  misc_feature 2: note = RNA
  misc_feature 4: note = RNA
  misc_feature 6: note = RNA
  misc_feature 8..23: note = RNA
  misc_feature 1: note = DNA
  misc_feature 5: note = DNA
  misc_feature 7: note = DNA
ttatagagcaagaacactgtttt

SEQ ID NO: 738 - RNA, 23 nt, synthetic construct
  source 1..23: mol_type = other RNA
  modified_base 1: mod_base = OTHER; note = 2'-O-methyluridine-3'-phosphate
  modified_base 2: mod_base = OTHER; note = 2'-deoxy-2'-fluorouridine-3'-phosphate
  modified_base 3: mod_base = OTHER; note = 2'-O-methyladenosine-3'-phosphate
  modified_base 4: mod_base = OTHER; note = 2'-deoxy-2'-fluorouridine-3'-phosphate
  modified_base 5: mod_base = OTHER; note = 2'-O-methyladenosine-3'-phosphate
  modified_base 6: mod_base = OTHER; note = 2'-deoxy-2'-fluoroguanosine-3'-phosphate
  modified_base 7: mod_base = OTHER; note = 2'-O-methyladenosine-3'-phosphate
  modified_base 8: mod_base = OTHER; note = 2'-deoxy-2'-fluoroguanosine-3'-phosphate
  modified_base 9: mod_base = OTHER; note = 2'-O-methylcytidine-3'-phosphate
  modified_base 10: mod_base = OTHER; note = 2'-deoxy-2'-fluoroadenosine-3'-phosphate
  modified_base 11: mod_base = OTHER; note = 2'-O-methyladenosine-3'-phosphate
  modified_base 12: mod_base = OTHER; note = 2'-deoxy-2'-fluoroguanosine-3'-phosphate
  modified_base 13: mod_base = OTHER; note = 2'-deoxy-2'-fluoroadenosine-3'-phosphate
  modified_base 14: mod_base = OTHER; note = 2'-deoxy-2'-fluoroadenosine-3'-phosphate
  modified_base 15: mod_base = OTHER; note = 2'-O-methylcytidine-3'-phosphate
  modified_base 16: mod_base = OTHER; note = 2'-deoxy-2'-fluoroadenosine-3'-phosphate
  modified_base 17: mod_base = OTHER; note = 2'-O-methylcytidine-3'-phosphate
  modified_base 18: mod_base = OTHER; note = 2'-deoxy-2'-fluorouridine-3'-phosphate
  modified_base 19: mod_base = OTHER; note = 2'-O-methylguanosine-3'-phosphate
  modified_base 20: mod_base = OTHER; note = 2'-O-methyluridine-3'-phosphate
  modified_base 21: mod_base = OTHER; note = 2'-O-methyluridine-3'-phosphorothioate
  modified_base 22: mod_base = OTHER; note = 2'-deoxy-2'-fluorouridine-3'-phosphorothioate
  modified_base 23: mod_base = OTHER; note = 2'-O-methyluridine
ttatagagcaagaacactgtttt

SEQ ID NO: 739 - RNA, 23 nt, synthetic construct
  source 1..23: mol_type = other RNA
  modified_base 1: mod_base = OTHER; note = 2'-O-methyluridine-3'-phosphate
  modified_base 2: mod_base = OTHER; note = 2'-deoxy-2'-fluorouridine-3'-phosphate
  modified_base 3: mod_base = OTHER; note = 2'-O-methyladenosine-3'-phosphate
  modified_base 4: mod_base = OTHER; note = 2'-deoxy-2'-fluorouridine-3'-phosphate
  modified_base 5: mod_base = OTHER; note = 2'-O-methyladenosine-3'-phosphate
  modified_base 6: mod_base = OTHER; note = 2'-deoxy-2'-fluoroguanosine-3'-phosphate
  modified_base 7: mod_base = OTHER; note = 2'-O-methyladenosine-3'-phosphate
  modified_base 8: mod_base = OTHER; note = 2'-deoxy-2'-fluoroguanosine-3'-phosphate
  modified_base 9: mod_base = OTHER; note = 2'-O-methylcytidine-3'-phosphate
  modified_base 10: mod_base = OTHER; note = 2'-deoxy-2'-fluoroadenosine-3'-phosphate
  modified_base 11: mod_base = OTHER; note = 2'-O-methyladenosine-3'-phosphate
  modified_base 12: mod_base = OTHER; note = 2'-deoxy-2'-fluoroguanosine-3'-phosphate
  modified_base 13: mod_base = OTHER; note = 2'-O-methyladenosine-3'-phosphate
  modified_base 14: mod_base = OTHER; note = 2'-deoxy-2'-fluoroadenosine-3'-phosphate
  modified_base 15: mod_base = OTHER; note = 2'-O-methylcytidine-3'-phosphate
  modified_base 16: mod_base = OTHER; note = 2'-deoxy-2'-fluoroadenosine-3'-phosphate
  modified_base 17: mod_base = OTHER; note = 2'-O-methylcytidine-3'-phosphate
  modified_base 18: mod_base = OTHER; note = 2'-deoxy-2'-fluorouridine-3'-phosphate
  modified_base 19: mod_base = OTHER; note = 2'-O-methylguanosine-3'-phosphate
  modified_base 20: mod_base = OTHER; note = 2'-deoxy-2'-fluorouridine-3'-phosphate
  modified_base 21: mod_base = OTHER; note = 2'-O-methyluridine-3'-phosphorothioate
  modified_base 22: mod_base = OTHER; note = 2'-deoxy-2'-fluorouridine-3'-phosphorothioate
  modified_base 23: mod_base = OTHER; note = 2'-O-methyluridine
ttatagagcaagaacactgtttt

SEQ ID NO: 740 - RNA, 23 nt, synthetic construct
  source 1..23: mol_type = other RNA
  modified_base 1: mod_base = OTHER; note = 2'-O-methyluridine-3'-phosphate
  modified_base 2: mod_base = OTHER; note = 2'-deoxy-2'-fluorouridine-3'-phosphate
  modified_base 3: mod_base = OTHER; note = 2'-O-methyladenosine-3'-phosphate
  modified_base 4: mod_base = OTHER; note = 2'-deoxy-2'-fluorouridine-3'-phosphate
  modified_base 5: mod_base = OTHER; note = 2'-O-methyladenosine-3'-phosphate
  modified_base 6: mod_base = OTHER; note = 2'-deoxy-2'-fluoroguanosine-3'-phosphate
  modified_base 7: mod_base = OTHER; note = 2'-O-methyladenosine-3'-phosphate
  modified_base 8: mod_base = OTHER; note = 2'-deoxy-2'-fluoroguanosine-3'-phosphate
  modified_base 9: mod_base = OTHER; note = 2'-O-methylcytidine-3'-phosphate
  modified_base 10: mod_base = OTHER; note = 2'-deoxy-2'-fluoroadenosine-3'-phosphate
  modified_base 11: mod_base = OTHER; note = 2'-O-methyladenosine-3'-phosphate
  modified_base 12: mod_base = OTHER; note = 2'-deoxy-2'-fluoroguanosine-3'-phosphate
  modified_base 13: mod_base = OTHER; note = 2'-O-methyladenosine-3'-phosphate
  modified_base 14: mod_base = OTHER; note = 2'-deoxy-2'-fluoroadenosine-3'-phosphate
  modified_base 15: mod_base = OTHER; note = 2'-O-methylcytidine-3'-phosphate
  modified_base 16: mod_base = OTHER; note = 2'-deoxy-2'-fluoroadenosine-3'-phosphate
  modified_base 17: mod_base = OTHER; note = 2'-O-methylcytidine-3'-phosphate
  modified_base 18: mod_base = OTHER; note = 2'-deoxy-2'-fluorouridine-3'-phosphate
  modified_base 19: mod_base = OTHER; note = 2'-O-methylguanosine-3'-phosphate
  modified_base 20: mod_base = OTHER; note = 2'-deoxy-2'-fluorouridine-3'-phosphate
  modified_base 21: mod_base = OTHER; note = 2'-O-methyluridine-3'-phosphorothioate
  modified_base 22: mod_base = OTHER; note = 2'-deoxy-2'-fluorouridine-3'-phosphorothioate
  modified_base 23: mod_base = OTHER; note = 2'-O-methyluridine
ttatagagcaagaacactgtttt

SEQ ID NO: 741 - RNA, 23 nt, synthetic construct
  source 1..23: mol_type = other RNA
  modified_base 1: mod_base = OTHER; note = 2'-O-methyluridine-3'-phosphate
  modified_base 2: mod_base = OTHER; note = 2'-deoxy-2'-fluorouridine-3'-phosphate
  modified_base 3: mod_base = OTHER; note = 2'-deoxy-2'-fluoroadenosine-3'-phosphate
  modified_base 4: mod_base = OTHER; note = 2'-deoxy-2'-fluorouridine-3'-phosphate
  modified_base 5: mod_base = OTHER; note = 2'-O-methyladenosine-3'-phosphate
  modified_base 6: mod_base = OTHER; note = 2'-deoxy-2'-fluoroguanosine-3'-phosphate
  modified_base 7: mod_base = OTHER; note = 2'-O-methyladenosine-3'-phosphate
  modified_base 8: mod_base = OTHER; note = 2'-deoxy-2'-fluoroguanosine-3'-phosphate
  modified_base 9: mod_base = OTHER; note = 2'-O-methylcytidine-3'-phosphate
  modified_base 10: mod_base = OTHER; note = 2'-deoxy-2'-fluoroadenosine-3'-phosphate
  modified_base 11: mod_base = OTHER; note = 2'-O-methyladenosine-3'-phosphate
  modified_base 12: mod_base = OTHER; note = 2'-deoxy-2'-fluoroguanosine-3'-phosphate
  modified_base 13: mod_base = OTHER; note = 2'-O-methyladenosine-3'-phosphate
  modified_base 14: mod_base = OTHER; note = 2'-deoxy-2'-fluoroadenosine-3'-phosphate
  modified_base 15: mod_base = OTHER; note = 2'-O-methylcytidine-3'-phosphate
  modified_base 16: mod_base = OTHER; note = 2'-deoxy-2'-fluoroadenosine-3'-phosphate
  modified_base 17: mod_base = OTHER; note = 2'-O-methylcytidine-3'-phosphate
  modified_base 18: mod_base = OTHER; note = 2'-deoxy-2'-fluorouridine-3'-phosphate
  modified_base 19: mod_base = OTHER; note = 2'-O-methylguanosine-3'-phosphate
  modified_base 20: mod_base = OTHER; note = 2'-deoxy-2'-fluorouridine-3'-phosphate
  modified_base 21: mod_base = OTHER; note = 2'-O-methyluridine-3'-phosphorothioate
  modified_base 22: mod_base = OTHER; note = 2'-O-methyluridine-3'-phosphorothioate
  modified_base 23: mod_base = OTHER; note = 2'-O-methyluridine
ttatagagcaagaacactgtttt

SEQ ID NO: 742 - RNA, 23 nt, synthetic construct
  source 1..23: mol_type = other RNA
  modified_base 1: mod_base = OTHER; note = 2'-O-methyluridine-3'-phosphate
  modified_base 2: mod_base = OTHER; note = 2'-deoxy-2'-fluorouridine-3'-phosphate
  modified_base 3: mod_base = OTHER; note = 2'-O-methyladenosine-3'-phosphate
  modified_base 4: mod_base = OTHER; note = 2'-deoxy-2'-fluorouridine-3'-phosphate
  modified_base 5: mod_base = OTHER; note = 2'-O-methyladenosine-3'-phosphate
  modified_base 6: mod_base = OTHER; note = 2'-deoxy-2'-fluoroguanosine-3'-phosphate
  modified_base 7: mod_base = OTHER; note = 2'-O-methyladenosine-3'-phosphate
  modified_base 8: mod_base = OTHER; note = 2'-deoxy-2'-fluoroguanosine-3'-phosphate
  modified_base 9: mod_base = OTHER; note = 2'-O-methylcytidine-3'-phosphate
  modified_base 10: mod_base = OTHER; note = 2'-deoxy-2'-fluoroadenosine-3'-phosphate
  modified_base 11: mod_base = OTHER; note = 2'-O-methyladenosine-3'-phosphate
  modified_base 12: mod_base = OTHER; note = 2'-deoxy-2'-fluoroguanosine-3'-phosphate
  modified_base 13: mod_base = OTHER; note = 2'-O-methyladenosine-3'-phosphate
  modified_base 14: mod_base = OTHER; note = 2'-deoxy-2'-fluoroadenosine-3'-phosphate
  modified_base 15: mod_base = OTHER; note = 2'-O-methylcytidine-3'-phosphate
  modified_base 16: mod_base = OTHER; note = 2'-deoxy-2'-fluoroadenosine-3'-phosphate
  modified_base 17: mod_base = OTHER; note = 2'-O-methylcytidine-3'-phosphate
  modified_base 18: mod_base = OTHER; note = 2'-deoxy-2'-fluorouridine-3'-phosphate
  modified_base 19: mod_base = OTHER; note = 2'-deoxy-2'-fluoroguanosine-3'-phosphate
  modified_base 20: mod_base = OTHER; note = 2'-deoxy-2'-fluorouridine-3'-phosphate
  modified_base 21: mod_base = OTHER; note = 2'-O-methyluridine-3'-phosphorothioate
  modified_base 22: mod_base = OTHER; note = 2'-O-methyluridine-3'-phosphorothioate
  modified_base 23: mod_base = OTHER; note = 2'-O-methyluridine
ttatagagcaagaacactgtttt

SEQ ID NO: 743 - RNA, 23 nt, synthetic construct
  source 1..23: mol_type = other RNA
  modified_base 1: mod_base = OTHER; note = 2'-O-methyluridine-3'-phosphate
  modified_base 2: mod_base = OTHER; note = 2'-deoxy-2'-fluorouridine-3'-phosphate
  modified_base 3: mod_base = OTHER; note = 2'-O-methyladenosine-3'-phosphate
  modified_base 4: mod_base = OTHER; note = 2'-deoxy-2'-fluorouridine-3'-phosphate
  modified_base 5: mod_base = OTHER; note = 2'-O-methyladenosine-3'-phosphate
  modified_base 6: mod_base = OTHER; note = 2'-deoxy-2'-fluoroguanosine-3'-phosphate
  modified_base 7: mod_base = OTHER; note = 2'-O-methyladenosine-3'-phosphate
  modified_base 8: mod_base = OTHER; note = 2'-deoxy-2'-fluoroguanosine-3'-phosphate
  modified_base 9: mod_base = OTHER; note = 2'-O-methylcytidine-3'-phosphate
  modified_base 10: mod_base = OTHER; note = 2'-deoxy-2'-fluoroadenosine-3'-phosphate
  modified_base 11: mod_base = OTHER; note = 2'-O-methyladenosine-3'-phosphate
  modified_base 12: mod_base = OTHER; note = 2'-deoxy-2'-fluoroguanosine-3'-phosphate
  modified_base 13: mod_base = OTHER; note = 2'-O-methyladenosine-3'-phosphate
  modified_base 14: mod_base = OTHER; note = 2'-deoxy-2'-fluoroadenosine-3'-phosphate
  modified_base 15: mod_base = OTHER; note = 2'-deoxy-2'-fluorocytidine-3'-phosphate
  modified_base 16: mod_base = OTHER; note = 2'-deoxy-2'-fluoroadenosine-3'-phosphate
  modified_base 17: mod_base = OTHER; note = 2'-O-methylcytidine-3'-phosphate
  modified_base 18: mod_base = OTHER; note = 2'-deoxy-2'-fluorouridine-3'-phosphate
  modified_base 19: mod_base = OTHER; note = 2'-O-methylguanosine-3'-phosphate
  modified_base 20: mod_base = OTHER; note = 2'-O-methyluridine-3'-phosphate
  modified_base 21: mod_base = OTHER; note = 2'-O-methyluridine-3'-phosphorothioate
  modified_base 22: mod_base = OTHER; note = 2'-deoxy-2'-fluorouridine-3'-phosphorothioate
  modified_base 23: mod_base = OTHER; note = 2'-O-methyluridine
ttatagagcaagaacactgtttt

SEQ ID NO: 744 - RNA, 23 nt, synthetic construct
  source 1..23: mol_type = other RNA
  modified_base 1: mod_base = OTHER; note = 2'-O-methyluridine-3'-phosphate
  modified_base 2: mod_base = OTHER; note = 2'-deoxy-2'-fluorouridine-3'-phosphate
  modified_base 3: mod_base = OTHER; note = 2'-O-methyladenosine-3'-phosphate
  modified_base 4: mod_base = OTHER; note = 2'-deoxy-2'-fluorouridine-3'-phosphate
  modified_base 5: mod_base = OTHER; note = 2'-O-methyladenosine-3'-phosphate
  modified_base 6: mod_base = OTHER; note = 2'-deoxy-2'-fluoroguanosine-3'-phosphate
  modified_base 7: mod_base = OTHER; note = 2'-O-methyladenosine-3'-phosphate
  modified_base 8: mod_base = OTHER; note = 2'-deoxy-2'-fluoroguanosine-3'-phosphate
  modified_base 9: mod_base = OTHER; note = 2'-O-methylcytidine-3'-phosphate
  modified_base 10: mod_base = OTHER; note = 2'-deoxy-2'-fluoroadenosine-3'-phosphate
  modified_base 11: mod_base = OTHER; note = 2'-O-methyladenosine-3'-phosphate
  modified_base 12: mod_base = OTHER; note = 2'-deoxy-2'-fluoroguanosine-3'-phosphate
  modified_base 13: mod_base = OTHER; note = 2'-O-methyladenosine-3'-phosphate
  modified_base 14: mod_base = OTHER; note = 2'-deoxy-2'-fluoroadenosine-3'-phosphate
  modified_base 15: mod_base = OTHER; note = 2'-O-methylcytidine-3'-phosphate
  modified_base 16: mod_base = OTHER; note = 2'-deoxy-2'-fluoroadenosine-3'-phosphate
  modified_base 17: mod_base = OTHER; note = 2'-O-methylcytidine-3'-phosphate
  modified_base 18: mod_base = OTHER; note = 2'-deoxy-2'-fluorouridine-3'-phosphate
  modified_base 19: mod_base = OTHER; note = 2'-O-methylguanosine-3'-phosphate
  modified_base 20: mod_base = OTHER; note = 2'-deoxy-2'-fluorouridine-3'-phosphate
  modified_base 21: mod_base = OTHER; note = 2'-O-methyluridine-3'-phosphorothioate
  modified_base 22: mod_base = OTHER; note = 2'-O-methyluridine-3'-phosphorothioate
  modified_base 23: mod_base = OTHER; note = 2'-O-methyluridine
ttatagagcaagaacactgtttt

SEQ ID NO: 745 - RNA, 23 nt, synthetic construct
  source 1..23: mol_type = other RNA
  modified_base 1: mod_base = OTHER; note = 2'-O-methyluridine-3'-phosphate
  modified_base 2: mod_base = OTHER; note = 2'-deoxy-2'-fluorouridine-3'-phosphate
  modified_base 3: mod_base = OTHER; note = 2'-O-methyladenosine-3'-phosphate
  modified_base 4: mod_base = OTHER; note = 2'-deoxy-2'-fluorouridine-3'-phosphate
  modified_base 5: mod_base = OTHER; note = 2'-O-methyladenosine-3'-phosphate
  modified_base 6: mod_base = OTHER; note = 2'-deoxy-2'-fluoroguanosine-3'-phosphate
  modified_base 7: mod_base = OTHER; note = 2'-O-methyladenosine-3'-phosphate
  modified_base 8: mod_base = OTHER; note = 2'-deoxy-2'-fluoroguanosine-3'-phosphate
  modified_base 9: mod_base = OTHER; note = 2'-O-methylcytidine-3'-phosphate
  modified_base 10: mod_base = OTHER; note = 2'-deoxy-2'-fluoroadenosine-3'-phosphate
  modified_base 11: mod_base = OTHER; note = 2'-O-methyladenosine-3'-phosphate
  modified_base 12: mod_base = OTHER; note = 2'-deoxy-2'-fluoroguanosine-3'-phosphate
  modified_base 13: mod_base = OTHER; note = 2'-O-methyladenosine-3'-phosphate
  modified_base 14: mod_base = OTHER; note = 2'-deoxy-2'-fluoroadenosine-3'-phosphate
  modified_base 15: mod_base = OTHER; note = 2'-O-methylcytidine-3'-phosphate
  modified_base 16: mod_base = OTHER; note = 2'-deoxy-2'-fluoroadenosine-3'-phosphate
  modified_base 17: mod_base = OTHER; note = 2'-O-methylcytidine-3'-phosphate
  modified_base 18: mod_base = OTHER; note = 2'-deoxy-2'-fluorouridine-3'-phosphate
  modified_base 19: mod_base = OTHER; note = 2'-O-methylguanosine-3'-phosphate
  modified_base 20: mod_base = OTHER; note = 2'-deoxy-2'-fluorouridine-3'-phosphate
  modified_base 21: mod_base = OTHER; note = 2'-O-methyluridine-3'-phosphorothioate
  modified_base 22: mod_base = OTHER; note = 2'-O-methyluridine-3'-phosphorothioate
  modified_base 23: mod_base = OTHER; note = 2'-O-methyluridine
ttatagagcaagaacactgtttt

SEQ ID NO: 746 - RNA, 23 nt, synthetic construct
  source 1..23: mol_type = other RNA
  modified_base 1: mod_base = OTHER; note = 2'-O-methyluridine-3'-phosphate
  modified_base 2: mod_base = OTHER; note = 2'-deoxy-2'-fluorouridine-3'-phosphate
  modified_base 3: mod_base = OTHER; note = 2'-O-methyladenosine-3'-phosphate
  modified_base 4: mod_base = OTHER; note = 2'-deoxy-2'-fluorouridine-3'-phosphate
  modified_base 5: mod_base = OTHER; note = 2'-O-methyladenosine-3'-phosphate
  modified_base 6: mod_base = OTHER; note = 2'-O-methylguanosine-3'-phosphate
  modified_base 7: mod_base = OTHER; note = 2'-O-methyladenosine-3'-phosphate
  modified_base 8: mod_base = OTHER; note = 2'-deoxy-2'-fluoroguanosine-3'-phosphate
  modified_base 9: mod_base = OTHER; note = 2'-O-methylcytidine-3'-phosphate
  modified_base 10: mod_base = OTHER; note = 2'-deoxy-2'-fluoroadenosine-3'-phosphate
  modified_base 11: mod_base = OTHER; note = 2'-O-methyladenosine-3'-phosphate
  modified_base 12: mod_base = OTHER; note = 2'-deoxy-2'-fluoroguanosine-3'-phosphate
  modified_base 13: mod_base = OTHER; note = 2'-O-methyladenosine-3'-phosphate
  modified_base 14: mod_base = OTHER; note = 2'-deoxy-2'-fluoroadenosine-3'-phosphate
  modified_base 15: mod_base = OTHER; note = 2'-O-methylcytidine-3'-phosphate
  modified_base 16: mod_base = OTHER; note = 2'-deoxy-2'-fluoroadenosine-3'-phosphate
  modified_base 17: mod_base = OTHER; note = 2'-O-methylcytidine-3'-phosphate
  modified_base 18: mod_base = OTHER; note = 2'-deoxy-2'-fluorouridine-3'-phosphate
  modified_base 19: mod_base = OTHER; note = 2'-O-methylguanosine-3'-phosphate
  modified_base 20: mod_base = OTHER; note = 2'-deoxy-2'-fluorouridine-3'-phosphate
  modified_base 21: mod_base = OTHER; note = 2'-O-methyluridine-3'-phosphorothioate
  modified_base 22: mod_base = OTHER; note = 2'-deoxy-2'-fluorouridine-3'-phosphorothioate
  modified_base 23: mod_base = OTHER; note = 2'-O-methyluridine
ttatagagcaagaacactgtttt

SEQ ID NO: 747 - RNA, 23 nt, synthetic construct
  source 1..23: mol_type = other RNA
  modified_base 1: mod_base = OTHER; note = 2'-O-methyluridine-3'-phosphate
  modified_base 2: mod_base = OTHER; note = 2'-deoxy-2'-fluorouridine-3'-phosphate
  modified_base 3: mod_base = OTHER; note = 2'-O-methyladenosine-3'-phosphate
  modified_base 4: mod_base = OTHER; note = 2'-deoxy-2'-fluorouridine-3'-phosphate
  modified_base 5: mod_base = OTHER; note = 2'-O-methyladenosine-3'-phosphate
  modified_base 6: mod_base = OTHER; note = 2'-deoxy-2'-fluoroguanosine-3'-phosphate
  modified_base 7: mod_base = OTHER; note = 2'-O-methyladenosine-3'-phosphate
  modified_base 8: mod_base = OTHER; note = 2'-deoxy-2'-fluoroguanosine-3'-phosphate
  modified_base 9: mod_base = OTHER; note = 2'-O-methylcytidine-3'-phosphate
  modified_base 10: mod_base = OTHER; note = 2'-deoxy-2'-fluoroadenosine-3'-phosphate
  modified_base 11: mod_base = OTHER; note = 2'-deoxy-2'-fluoroadenosine-3'-phosphate
  modified_base 12: mod_base = OTHER; note = 2'-deoxy-2'-fluoroguanosine-3'-phosphate
  modified_base 13: mod_base = OTHER; note = 2'-O-methyladenosine-3'-phosphate
  modified_base 14: mod_base = OTHER; note = 2'-deoxy-2'-fluoroadenosine-3'-phosphate
  modified_base 15: mod_base = OTHER; note = 2'-O-methylcytidine-3'-phosphate
  modified_base 16: mod_base = OTHER; note = 2'-deoxy-2'-fluoroadenosine-3'-phosphate
  modified_base 17: mod_base = OTHER; note = 2'-O-methylcytidine-3'-phosphate
  modified_base 18: mod_base = OTHER; note = 2'-deoxy-2'-fluorouridine-3'-phosphate
  modified_base 19: mod_base = OTHER; note = 2'-O-methylguanosine-3'-phosphate
  modified_base 20: mod_base = OTHER; note = 2'-deoxy-2'-fluorouridine-3'-phosphate
  modified_base 21: mod_base = OTHER; note = 2'-O-methyluridine-3'-phosphorothioate
  modified_base 22: mod_base = OTHER; note = 2'-deoxy-2'-fluorouridine-3'-phosphorothioate
  modified_base 23: mod_base = OTHER; note = 2'-O-methyluridine
ttatagagcaagaacactgtttt

SEQ ID NO: 748 - RNA, 23 nt, synthetic construct
  source 1..23: mol_type = other RNA
  modified_base 1: mod_base = OTHER; note = 2'-O-methyluridine-3'-phosphate
  modified_base 2: mod_base = OTHER; note = 2'-deoxy-2'-fluorouridine-3'-phosphate
  modified_base 3: mod_base = OTHER; note = 2'-O-methyladenosine-3'-phosphate
  modified_base 4: mod_base = OTHER; note = 2'-deoxy-2'-fluorouridine-3'-phosphate
  modified_base 5: mod_base = OTHER; note = 2'-deoxy-2'-fluoroadenosine-3'-phosphate
  modified_base 6: mod_base = OTHER; note = 2'-deoxy-2'-fluoroguanosine-3'-phosphate
  modified_base 7: mod_base = OTHER; note = 2'-O-methyladenosine-3'-phosphate
  modified_base 8: mod_base = OTHER; note = 2'-deoxy-2'-fluoroguanosine-3'-phosphate
  modified_base 9: mod_base = OTHER; note = 2'-O-methylcytidine-3'-phosphate
  modified_base 10: mod_base = OTHER; note = 2'-deoxy-2'-fluoroadenosine-3'-phosphate
  modified_base 11: mod_base = OTHER; note = 2'-O-methyladenosine-3'-phosphate
  modified_base 12: mod_base = OTHER; note = 2'-deoxy-2'-fluoroguanosine-3'-phosphate
  modified_base 13: mod_base = OTHER; note = 2'-O-methyladenosine-3'-phosphate
  modified_base 14: mod_base = OTHER; note = 2'-deoxy-2'-fluoroadenosine-3'-phosphate
  modified_base 15: mod_base = OTHER; note = 2'-O-methylcytidine-3'-phosphate
  modified_base 16: mod_base = OTHER; note = 2'-deoxy-2'-fluoroadenosine-3'-phosphate
  modified_base 17: mod_base = OTHER; note = 2'-O-methylcytidine-3'-phosphate
  modified_base 18: mod_base = OTHER; note = 2'-deoxy-2'-fluorouridine-3'-phosphate
  modified_base 19: mod_base = OTHER; note = 2'-O-methylguanosine-3'-phosphate
  modified_base 20: mod_base = OTHER; note = 2'-deoxy-2'-fluorouridine-3'-phosphate
  modified_base 21: mod_base = OTHER; note = 2'-O-methyluridine-3'-phosphorothioate
  modified_base 22: mod_base = OTHER; note = 2'-O-methyluridine-3'-phosphorothioate
  modified_base 23: mod_base = OTHER; note = 2'-O-methyluridine
ttatagagcaagaacactgtttt

SEQ ID NO: 749 - RNA, 23 nt, synthetic construct
  source 1..23: mol_type = other RNA
  modified_base 1: mod_base = OTHER; note = 2'-O-methyluridine-3'-phosphate
  modified_base 2: mod_base = OTHER; note = 2'-deoxy-2'-fluorouridine-3'-phosphate
  modified_base 3: mod_base = OTHER; note = 2'-O-methyladenosine-3'-phosphate
  modified_base 4: mod_base = OTHER; note = 2'-deoxy-2'-fluorouridine-3'-phosphate
  modified_base 5: mod_base = OTHER; note = 2'-O-methyladenosine-3'-phosphate
  modified_base 6: mod_base = OTHER; note = 2'-deoxy-2'-fluoroguanosine-3'-phosphate
  modified_base 7: mod_base = OTHER; note = 2'-O-methyladenosine-3'-phosphate
  modified_base 8: mod_base = OTHER; note = 2'-deoxy-2'-fluoroguanosine-3'-phosphate
  modified_base 9: mod_base = OTHER; note = 2'-O-methylcytidine-3'-phosphate
  modified_base 10: mod_base = OTHER; note = 2'-deoxy-2'-fluoroadenosine-3'-phosphate
  modified_base 11: mod_base = OTHER; note = 2'-O-methyladenosine-3'-phosphate
  modified_base 12: mod_base = OTHER; note = 2'-deoxy-2'-fluoroguanosine-3'-phosphate
  modified_base 13: mod_base = OTHER; note = 2'-O-methyladenosine-3'-phosphate
  modified_base 14: mod_base = OTHER; note = 2'-deoxy-2'-fluoroadenosine-3'-phosphate
  modified_base 15: mod_base = OTHER; note = 2'-O-methylcytidine-3'-phosphate
  modified_base 16: mod_base = OTHER; note = 2'-deoxy-2'-fluoroadenosine-3'-phosphate
  modified_base 17: mod_base = OTHER; note = 2'-O-methylcytidine-3'-phosphate
  modified_base 18: mod_base = OTHER; note = 2'-deoxy-2'-fluorouridine-3'-phosphate
  modified_base 19: mod_base = OTHER; note = 2'-O-methylguanosine-3'-phosphate
  modified_base 20: mod_base = OTHER; note = 2'-O-methyluridine-3'-phosphate
  modified_base 21: mod_base = OTHER; note = 2'-O-methyluridine-3'-phosphorothioate
  modified_base 22: mod_base = OTHER; note = 2'-deoxy-2'-fluorouridine-3'-phosphorothioate
  modified_base 23: mod_base = OTHER; note = 2'-O-methyluridine
ttatagagcaagaacactgtttt

SEQ ID NO: 750 - RNA, 23 nt, synthetic construct
  source 1..23: mol_type = other RNA
  modified_base 1: mod_base = OTHER; note = 2'-O-methyluridine-3'-phosphate
  modified_base 2: mod_base = OTHER; note = 2'-deoxy-2'-fluorouridine-3'-phosphate
  modified_base 3: mod_base = OTHER; note = 2'-O-methyladenosine-3'-phosphate
  modified_base 4: mod_base = OTHER; note = 2'-deoxy-2'-fluorouridine-3'-phosphate
  modified_base 5: mod_base = OTHER; note = 2'-O-methyladenosine-3'-phosphate
  modified_base 6: mod_base = OTHER; note = 2'-deoxy-2'-fluoroguanosine-3'-phosphate
  modified_base 7: mod_base = OTHER; note = 2'-O-methyladenosine-3'-phosphate
  modified_base 8: mod_base = OTHER; note = 2'-deoxy-2'-fluoroguanosine-3'-phosphate
  modified_base 9: mod_base = OTHER; note = 2'-O-methylcytidine-3'-phosphate
  modified_base 10: mod_base = OTHER; note = 2'-deoxy-2'-fluoroadenosine-3'-phosphate
  modified_base 11: mod_base = OTHER; note = 2'-O-methyladenosine-3'-phosphate
  modified_base 12: mod_base = OTHER; note = 2'-deoxy-2'-fluoroguanosine-3'-phosphate
  modified_base 13: mod_base = OTHER; note = 2'-O-methyladenosine-3'-phosphate
  modified_base 14: mod_base = OTHER; note = 2'-deoxy-2'-fluoroadenosine-3'-phosphate
  modified_base 15: mod_base = OTHER; note = 2'-O-methylcytidine-3'-phosphate
  modified_base 16: mod_base = OTHER; note = 2'-deoxy-2'-fluoroadenosine-3'-phosphate
  modified_base 17: mod_base = OTHER; note = 2'-O-methylcytidine-3'-phosphate
  modified_base 18: mod_base = OTHER; note = 2'-deoxy-2'-fluorouridine-3'-phosphate
  modified_base 19: mod_base = OTHER; note = 2'-O-methylguanosine-3'-phosphate
  modified_base 20: mod_base = OTHER; note = 2'-O-methyluridine-3'-phosphate
  modified_base 21: mod_base = OTHER; note = 2'-O-methyluridine-3'-phosphorothioate
  modified_base 22: mod_base = OTHER; note = 2'-deoxy-2'-fluorouridine-3'-phosphorothioate
  modified_base 23: mod_base = OTHER; note = 2'-O-methyluridine
ttatagagcaagaacactgtttt

SEQ ID NO: 751 - RNA, 23 nt, synthetic construct
  source 1..23: mol_type = other RNA
  modified_base 1: mod_base = OTHER; note = 2'-O-methyluridine-3'-phosphate
  modified_base 2: mod_base = OTHER; note = 2'-deoxy-2'-fluorouridine-3'-phosphate
  modified_base 3: mod_base = OTHER; note = 2'-O-methyladenosine-3'-phosphate
  modified_base 4: mod_base = OTHER; note = 2'-O-methyluridine-3'-phosphate
  modified_base 5: mod_base = OTHER; note = 2'-O-methyladenosine-3'-phosphate
  modified_base 6: mod_base = OTHER; note = 2'-deoxy-2'-fluoroguanosine-3'-phosphate
  modified_base 7: mod_base = OTHER; note = 2'-O-methyladenosine-3'-phosphate
  modified_base 8: mod_base = OTHER; note = 2'-deoxy-2'-fluoroguanosine-3'-phosphate
  modified_base 9: mod_base = OTHER; note = 2'-O-methylcytidine-3'-phosphate
  modified_base 10: mod_base = OTHER; note = 2'-deoxy-2'-fluoroadenosine-3'-phosphate
  modified_base 11: mod_base = OTHER; note = 2'-O-methyladenosine-3'-phosphate
  modified_base 12: mod_base = OTHER; note = 2'-deoxy-2'-fluoroguanosine-3'-phosphate
  modified_base 13: mod_base = OTHER; note = 2'-O-methyladenosine-3'-phosphate
  modified_base 14: mod_base = OTHER; note = 2'-deoxy-2'-fluoroadenosine-3'-phosphate
  modified_base 15: mod_base = OTHER; note = 2'-O-methylcytidine-3'-phosphate
  modified_base 16: mod_base = OTHER; note = 2'-deoxy-2'-fluoroadenosine-3'-phosphate
  modified_base 17: mod_base = OTHER; note = 2'-O-methylcytidine-3'-phosphate
  modified_base 18: mod_base = OTHER; note = 2'-deoxy-2'-fluorouridine-3'-phosphate
  modified_base 19: mod_base = OTHER; note = 2'-O-methylguanosine-3'-phosphate
  modified_base 20: mod_base = OTHER; note = 2'-deoxy-2'-fluorouridine-3'-phosphate
  modified_base 21: mod_base = OTHER; note = 2'-O-methyluridine-3'-phosphorothioate
  modified_base 22: mod_base = OTHER; note = 2'-deoxy-2'-fluorouridine-3'-phosphorothioate
  modified_base 23: mod_base = OTHER; note = 2'-O-methyluridine
ttatagagcaagaacactgtttt

SEQ ID NO: 752 - RNA, 23 nt, synthetic construct
  source 1..23: mol_type = other RNA
  modified_base 1: mod_base = OTHER; note = 2'-O-methyluridine-3'-phosphate
  modified_base 2: mod_base = OTHER; note = 2'-deoxy-2'-fluorouridine-3'-phosphate
  modified_base 3: mod_base = OTHER; note = 2'-O-methyladenosine-3'-phosphate
  modified_base 4: mod_base = OTHER; note = 2'-deoxy-2'-fluorouridine-3'-phosphate
  modified_base 5: mod_base = OTHER; note = 2'-O-methyladenosine-3'-phosphate
  modified_base 6: mod_base = OTHER; note = 2'-deoxy-2'-fluoroguanosine-3'-phosphate
  modified_base 7: mod_base = OTHER; note = 2'-O-methyladenosine-3'-phosphate
  modified_base 8: mod_base = OTHER; note = 2'-deoxy-2'-fluoroguanosine-3'-phosphate
  modified_base 9: mod_base = OTHER; note = 2'-O-methylcytidine-3'-phosphate
  modified_base 10: mod_base = OTHER; note = 2'-deoxy-2'-fluoroadenosine-3'-phosphate
  modified_base 11: mod_base = OTHER; note = 2'-O-methyladenosine-3'-phosphate
  modified_base 12: mod_base = OTHER; note = 2'-deoxy-2'-fluoroguanosine-3'-phosphate
  modified_base 13: mod_base = OTHER; note = 2'-deoxy-2'-fluoroadenosine-3'-phosphate
  modified_base 14: mod_base = OTHER; note = 2'-deoxy-2'-fluoroadenosine-3'-phosphate
  modified_base 15: mod_base = OTHER; note = 2'-O-methylcytidine-3'-phosphate
  modified_base 16: mod_base = OTHER; note = 2'-deoxy-2'-fluoroadenosine-3'-phosphate
  modified_base 17: mod_base = OTHER; note = 2'-O-methylcytidine-3'-phosphate
  modified_base 18: mod_base = OTHER; note = 2'-deoxy-2'-fluorouridine-3'-phosphate
  modified_base 19: mod_base = OTHER; note = 2'-O-methylguanosine-3'-phosphate
  modified_base 20: mod_base = OTHER; note = 2'-deoxy-2'-fluorouridine-3'-phosphate
  modified_base 21: mod_base = OTHER; note = 2'-O-methyluridine-3'-phosphorothioate
  modified_base 22: mod_base = OTHER; note = 2'-deoxy-2'-fluorouridine-3'-phosphorothioate
  modified_base 23: mod_base = OTHER; note = 2'-O-methyluridine
ttatagagcaagaacactgtttt

SEQ ID NO: 753 - RNA, 23 nt, synthetic construct
  source 1..23: mol_type = other RNA
  modified_base 1: mod_base = OTHER; note = 2'-O-methyluridine-3'-phosphate
  modified_base 2: mod_base = OTHER; note = 2'-deoxy-2'-fluorouridine-3'-phosphate
  modified_base 3: mod_base = OTHER; note = 2'-deoxy-2'-fluoroadenosine-3'-phosphate
  modified_base 4: mod_base = OTHER; note = 2'-deoxy-2'-fluorouridine-3'-phosphate
  modified_base 5: mod_base = OTHER; note = 2'-O-methyladenosine-3'-phosphate
  modified_base 6: mod_base = OTHER; note = 2'-deoxy-2'-fluoroguanosine-3'-phosphate
  modified_base 7: mod_base = OTHER; note = 2'-O-methyladenosine-3'-phosphate
  modified_base 8: mod_base = OTHER; note = 2'-deoxy-2'-fluoroguanosine-3'-phosphate
  modified_base 9: mod_base = OTHER; note = 2'-O-methylcytidine-3'-phosphate
  modified_base 10: mod_base = OTHER; note = 2'-deoxy-2'-fluoroadenosine-3'-phosphate
  modified_base 11: mod_base = OTHER; note = 2'-O-methyladenosine-3'-phosphate
  modified_base 12: mod_base = OTHER; note = 2'-deoxy-2'-fluoroguanosine-3'-phosphate
  modified_base 13: mod_base = OTHER; note = 2'-O-methyladenosine-3'-phosphate
  modified_base 14: mod_base = OTHER; note = 2'-deoxy-2'-fluoroadenosine-3'-phosphate
  modified_base 15: mod_base = OTHER; note = 2'-O-methylcytidine-3'-phosphate
  modified_base 16: mod_base = OTHER; note = 2'-deoxy-2'-fluoroadenosine-3'-phosphate
  modified_base 17: mod_base = OTHER; note = 2'-O-methylcytidine-3'-phosphate
  modified_base 18: mod_base = OTHER; note = 2'-deoxy-2'-fluorouridine-3'-phosphate
  modified_base 19: mod_base = OTHER; note = 2'-O-methylguanosine-3'-phosphate
  modified_base 20: mod_base = OTHER; note = 2'-O-methyluridine-3'-phosphate
  modified_base 21: mod_base = OTHER; note = 2'-O-methyluridine-3'-phosphorothioate
  modified_base 22: mod_base = OTHER; note = 2'-deoxy-2'-fluorouridine-3'-phosphorothioate
  modified_base 23: mod_base = OTHER; note = 2'-O-methyluridine
ttatagagcaagaacactgtttt

SEQ ID NO: 754 - RNA, 23 nt, synthetic construct
  source 1..23: mol_type = other RNA
  modified_base 1: mod_base = OTHER; note = 2'-O-methyluridine-3'-phosphate
  modified_base 2: mod_base = OTHER; note = 2'-deoxy-2'-fluorouridine-3'-phosphate
  modified_base 3: mod_base = OTHER; note = 2'-O-methyladenosine-3'-phosphate
  modified_base 4: mod_base = OTHER; note = 2'-deoxy-2'-fluorouridine-3'-phosphate
  modified_base 5: mod_base = OTHER; note = 2'-O-methyladenosine-3'-phosphate
  modified_base 6: mod_base = OTHER; note = 2'-deoxy-2'-fluoroguanosine-3'-phosphate
  modified_base 7: mod_base = OTHER; note = 2'-O-methyladenosine-3'-phosphate
  modified_base 8: mod_base = OTHER; note = 2'-deoxy-2'-fluoroguanosine-3'-phosphate
  modified_base 9: mod_base = OTHER; note = 2'-O-methylcytidine-3'-phosphate
  modified_base 10: mod_base = OTHER; note = 2'-deoxy-2'-fluoroadenosine-3'-phosphate
  modified_base 11: mod_base = OTHER; note = 2'-O-methyladenosine-3'-phosphate
  modified_base 12: mod_base = OTHER; note = 2'-deoxy-2'-fluoroguanosine-3'-phosphate
  modified_base 13: mod_base = OTHER; note = 2'-O-methyladenosine-3'-phosphate
  modified_base 14: mod_base = OTHER; note = 2'-deoxy-2'-fluoroadenosine-3'-phosphate
  modified_base 15: mod_base = OTHER; note = 2'-O-methylcytidine-3'-phosphate
  modified_base 16: mod_base = OTHER; note = 2'-deoxy-2'-fluoroadenosine-3'-phosphate
  modified_base 17: mod_base = OTHER; note = 2'-O-methylcytidine-3'-phosphate
  modified_base 18: mod_base = OTHER; note = 2'-O-methyluridine-3'-phosphate
  modified_base 19: mod_base = OTHER; note = 2'-O-methylguanosine-3'-phosphate
  modified_base 20: mod_base = OTHER; note = 2'-deoxy-2'-fluorouridine-3'-phosphate
  modified_base 21: mod_base = OTHER; note = 2'-O-methyluridine-3'-phosphorothioate
  modified_base 22: mod_base = OTHER; note = 2'-deoxy-2'-fluorouridine-3'-phosphorothioate
  modified_base 23: mod_base = OTHER; note = 2'-O-methyluridine
ttatagagcaagaacactgtttt

SEQ ID NO: 755 - RNA, 23 nt, synthetic construct
  source 1..23: mol_type = other RNA
  modified_base 1: mod_base = OTHER; note = 2'-O-methyluridine-3'-phosphate
  modified_base 2: mod_base = OTHER; note = 2'-O-methyluridine-3'-phosphate
  modified_base 3: mod_base = OTHER; note = 2'-O-methyladenosine-3'-phosphate
  modified_base 4: mod_base = OTHER; note = 2'-deoxy-2'-fluorouridine-3'-phosphate
  modified_base 5: mod_base = OTHER; note = 2'-O-methyladenosine-3'-phosphate
  modified_base 6: mod_base = OTHER; note = 2'-deoxy-2'-fluoroguanosine-3'-phosphate
  modified_base 7: mod_base = OTHER; note = 2'-O-methyladenosine-3'-phosphate
  modified_base 8: mod_base = OTHER; note = 2'-deoxy-2'-fluoroguanosine-3'-phosphate
  modified_base 9: mod_base = OTHER; note = 2'-O-methylcytidine-3'-phosphate
  modified_base 10: mod_base = OTHER; note = 2'-deoxy-2'-fluoroadenosine-3'-phosphate
  modified_base 11: mod_base = OTHER; note = 2'-O-methyladenosine-3'-phosphate
  modified_base 12: mod_base = OTHER; note = 2'-deoxy-2'-fluoroguanosine-3'-phosphate
  modified_base 13: mod_base = OTHER; note = 2'-O-methyladenosine-3'-phosphate
  modified_base 14: mod_base = OTHER; note = 2'-deoxy-2'-fluoroadenosine-3'-phosphate
  modified_base 15: mod_base = OTHER; note = 2'-O-methylcytidine-3'-phosphate
  modified_base 16: mod_base = OTHER; note = 2'-deoxy-2'-fluoroadenosine-3'-phosphate
  modified_base 17: mod_base = OTHER; note = 2'-O-methylcytidine-3'-phosphate
  modified_base 18: mod_base = OTHER; note = 2'-deoxy-2'-fluorouridine-3'-phosphate
  modified_base 19: mod_base = OTHER; note = 2'-O-methylguanosine-3'-phosphate
  modified_base 20: mod_base = OTHER; note = 2'-deoxy-2'-fluorouridine-3'-phosphate
  modified_base 21: mod_base = OTHER; note = 2'-O-methyluridine-3'-phosphorothioate
  modified_base 22: mod_base = OTHER; note = 2'-deoxy-2'-fluorouridine-3'-phosphorothioate
  modified_base 23: mod_base = OTHER; note = 2'-O-methyluridine
ttatagagcaagaacactgtttt

SEQ ID NO: 756 - RNA, 23 nt, synthetic construct
  source 1..23: mol_type = other RNA
  modified_base 1: mod_base = OTHER; note = 2'-O-methyluridine-3'-phosphate
  modified_base 2: mod_base = OTHER; note = 2'-deoxy-2'-fluorouridine-3'-phosphate
  modified_base 3: mod_base = OTHER; note = 2'-O-methyladenosine-3'-phosphate
  modified_base 4: mod_base = OTHER; note = 2'-deoxy-2'-fluorouridine-3'-phosphate
  modified_base 5: mod_base = OTHER; note = 2'-O-methyladenosine-3'-phosphate
  modified_base 6: mod_base = OTHER; note = 2'-deoxy-2'-fluoroguanosine-3'-phosphate
  modified_base 7: mod_base = OTHER; note = 2'-O-methyladenosine-3'-phosphate
  modified_base 8: mod_base = OTHER; note = 2'-deoxy-2'-fluoroguanosine-3'-phosphate
  modified_base 9: mod_base = OTHER; note = 2'-O-methylcytidine-3'-phosphate
  modified_base 10: mod_base = OTHER; note = 2'-deoxy-2'-fluoroadenosine-3'-phosphate
  modified_base 11: mod_base = OTHER; note = 2'-O-methyladenosine-3'-phosphate
  modified_base 12: mod_base = OTHER; note = 2'-deoxy-2'-fluoroguanosine-3'-phosphate
  modified_base 13: mod_base = OTHER; note = 2'-O-methyladenosine-3'-phosphate
  modified_base 14: mod_base = OTHER; note = 2'-deoxy-2'-fluoroadenosine-3'-phosphate
  modified_base 15: mod_base = OTHER; note = 2'-deoxy-2'-fluorocytidine-3'-phosphate
  modified_base 16: mod_base = OTHER; note = 2'-deoxy-2'-fluoroadenosine-3'-phosphate
  modified_base 17: mod_base = OTHER; note = 2'-O-methylcytidine-3'-phosphate
  modified_base 18: mod_base = OTHER; note = 2'-deoxy-2'-fluorouridine-3'-phosphate
  modified_base 19: mod_base = OTHER; note = 2'-O-methylguanosine-3'-phosphate
  modified_base 20: mod_base = OTHER; note = 2'-deoxy-2'-fluorouridine-3'-phosphate
  modified_base 21: mod_base = OTHER; note = 2'-O-methyluridine-3'-phosphorothioate
  modified_base 22: mod_base = OTHER; note = 2'-deoxy-2'-fluorouridine-3'-phosphorothioate
  modified_base 23: mod_base = OTHER; note = 2'-O-methyluridine
ttatagagcaagaacactgtttt

SEQ ID NO: 757 - RNA, 23 nt, synthetic construct
  source 1..23: mol_type = other RNA
  modified_base 1: mod_base = OTHER; note = 2'-O-methyluridine-3'-phosphate
  modified_base 2: mod_base = OTHER; note = 2'-deoxy-2'-fluorouridine-3'-phosphate
  modified_base 3: mod_base = OTHER; note = 2'-O-methyladenosine-3'-phosphate
  modified_base 4: mod_base = OTHER; note = 2'-deoxy-2'-fluorouridine-3'-phosphate
  modified_base 5: mod_base = OTHER; note = 2'-deoxy-2'-fluoroadenosine-3'-phosphate
  modified_base 6: mod_base = OTHER; note = 2'-deoxy-2'-fluoroguanosine-3'-phosphate
  modified_base 7: mod_base = OTHER; note = 2'-O-methyladenosine-3'-phosphate
  modified_base 8: mod_base = OTHER; note = 2'-deoxy-2'-fluoroguanosine-3'-phosphate
  modified_base 9: mod_base = OTHER; note = 2'-O-methylcytidine-3'-phosphate
  modified_base 10: mod_base = OTHER; note = 2'-deoxy-2'-fluoroadenosine-3'-phosphate
  modified_base 11: mod_base = OTHER; note = 2'-O-methyladenosine-3'-phosphate
  modified_base 12: mod_base = OTHER; note = 2'-deoxy-2'-fluoroguanosine-3'-phosphate
  modified_base 13: mod_base = OTHER; note = 2'-O-methyladenosine-3'-phosphate
  modified_base 14: mod_base = OTHER; note = 2'-deoxy-2'-fluoroadenosine-3'-phosphate
  modified_base 15: mod_base = OTHER; note = 2'-O-methylcytidine-3'-phosphate
  modified_base 16: mod_base = OTHER; note = 2'-deoxy-2'-fluoroadenosine-3'-phosphate
  modified_base 17: mod_base = OTHER; note = 2'-O-methylcytidine-3'-phosphate
  modified_base 18: mod_base = OTHER; note = 2'-deoxy-2'-fluorouridine-3'-phosphate
  modified_base 19: mod_base = OTHER; note = 2'-O-methylguanosine-3'-phosphate
  modified_base 20: mod_base = OTHER; note = 2'-O-methyluridine-3'-phosphate
  modified_base 21: mod_base = OTHER; note = 2'-O-methyluridine-3'-phosphorothioate
  modified_base 22: mod_base = OTHER; note = 2'-deoxy-2'-fluorouridine-3'-phosphorothioate
  modified_base 23: mod_base = OTHER; note = 2'-O-methyluridine
ttatagagcaagaacactgtttt

SEQ ID NO: 758 - RNA, 23 nt, synthetic construct
  source 1..23: mol_type = other RNA
  modified_base 1: mod_base = OTHER; note = 2'-O-methyluridine-3'-phosphate
  modified_base 2: mod_base = OTHER; note = 2'-deoxy-2'-fluorouridine-3'-phosphate
  modified_base 3: mod_base = OTHER; note = 2'-O-methyladenosine-3'-phosphate
  modified_base 4: mod_base = OTHER; note = 2'-deoxy-2'-fluorouridine-3'-phosphate
  modified_base 5: mod_base = OTHER; note = 2'-O-methyladenosine-3'-phosphate
  modified_base 6: mod_base = OTHER; note = 2'-deoxy-2'-fluoroguanosine-3'-phosphate
  modified_base 7: mod_base = OTHER; note = 2'-O-methyladenosine-3'-phosphate
  modified_base 8: mod_base = OTHER; note = 2'-deoxy-2'-fluoroguanosine-3'-phosphate
  modified_base 9: mod_base = OTHER; note = 2'-O-methylcytidine-3'-phosphate
  modified_base 10: mod_base = OTHER; note = 2'-deoxy-2'-fluoroadenosine-3'-phosphate
  modified_base 11: mod_base = OTHER; note = 2'-O-methyladenosine-3'-phosphate
  modified_base 12: mod_base = OTHER; note = 2'-deoxy-2'-fluoroguanosine-3'-phosphate
  modified_base 13: mod_base = OTHER; note = 2'-O-methyladenosine-3'-phosphate
  modified_base 14: mod_base = OTHER; note = 2'-deoxy-2'-fluoroadenosine-3'-phosphate
  modified_base 15: mod_base = OTHER; note = 2'-O-methylcytidine-3'-phosphate
  modified_base 16: mod_base = OTHER; note = 2'-O-methyladenosine-3'-phosphate
  modified_base 17: mod_base = OTHER; note = 2'-O-methylcytidine-3'-phosphate
  modified_base 18: mod_base = OTHER; note = 2'-deoxy-2'-fluorouridine-3'-phosphate
  modified_base 19: mod_base = OTHER; note = 2'-O-methylguanosine-3'-phosphate
  modified_base 20: mod_base = OTHER; note = 2'-deoxy-2'-fluorouridine-3'-phosphate
  modified_base 21: mod_base = OTHER; note = 2'-O-methyluridine-3'-phosphorothioate
  modified_base 22: mod_base = OTHER; note = 2'-deoxy-2'-fluorouridine-3'-phosphorothioate
  modified_base 23: mod_base = OTHER; note = 2'-O-methyluridine
ttatagagcaagaacactgtttt

SEQ ID NO: 759 - RNA, 23 nt, synthetic construct
  source 1..23: mol_type = other RNA
  modified_base 1: mod_base = OTHER; note = 2'-O-methyluridine-3'-phosphate
  modified_base 2: mod_base = OTHER; note = 2'-deoxy-2'-fluorouridine-3'-phosphate
  modified_base 3: mod_base = OTHER; note = 2'-O-methyladenosine-3'-phosphate
  modified_base 4: mod_base = OTHER; note = 2'-deoxy-2'-fluorouridine-3'-phosphate
  modified_base 5: mod_base = OTHER; note = 2'-O-methyladenosine-3'-phosphate
  modified_base 6: mod_base = OTHER; note = 2'-deoxy-2'-fluoroguanosine-3'-phosphate
  modified_base 7: mod_base = OTHER; note = 2'-O-methyladenosine-3'-phosphate
  modified_base 8: mod_base = OTHER; note = 2'-deoxy-2'-fluoroguanosine-3'-phosphate
  modified_base 9: mod_base = OTHER; note = 2'-O-methylcytidine-3'-phosphate
  modified_base 10: mod_base = OTHER; note = 2'-deoxy-2'-fluoroadenosine-3'-phosphate
  modified_base 11: mod_base = OTHER; note = 2'-O-methyladenosine-3'-phosphate
  modified_base 12: mod_base = OTHER; note = 2'-deoxy-2'-fluoroguanosine-3'-phosphate
  modified_base 13: mod_base = OTHER; note = 2'-O-methyladenosine-3'-phosphate
  modified_base 14: mod_base = OTHER; note = 2'-deoxy-2'-fluoroadenosine-3'-phosphate
  modified_base 15: mod_base = OTHER; note = 2'-O-methylcytidine-3'-phosphate
  modified_base 16: mod_base = OTHER; note = 2'-deoxy-2'-fluoroadenosine-3'-phosphate
  modified_base 17: mod_base = OTHER; note = 2'-deoxy-2'-fluorocytidine-3'-phosphate
  modified_base 18: mod_base = OTHER; note = 2'-deoxy-2'-fluorouridine-3'-phosphate
  modified_base 19: mod_base = OTHER; note = 2'-O-methylguanosine-3'-phosphate
  modified_base 20: mod_base = OTHER; note = 2'-deoxy-2'-fluorouridine-3'-phosphate
  modified_base 21: mod_base = OTHER; note = 2'-O-methyluridine-3'-phosphorothioate
  modified_base 22: mod_base = OTHER; note = 2'-deoxy-2'-fluorouridine-3'-phosphorothioate
  modified_base 23: mod_base = OTHER; note = 2'-O-methyluridine
ttatagagcaagaacactgtttt

SEQ ID NO: 760 - RNA, 23 nt, synthetic construct
  source 1..23: mol_type = other RNA
  modified_base 1: mod_base = OTHER; note = 2'-O-methyluridine-3'-phosphate
  modified_base 2: mod_base = OTHER; note = 2'-deoxy-2'-fluorouridine-3'-phosphate
  modified_base 3: mod_base = OTHER; note = 2'-O-methyladenosine-3'-phosphate
  modified_base 4: mod_base = OTHER; note = 2'-deoxy-2'-fluorouridine-3'-phosphate
  modified_base 5: mod_base = OTHER; note = 2'-O-methyladenosine-3'-phosphate
  modified_base 6: mod_base = OTHER; note = 2'-deoxy-2'-fluoroguanosine-3'-phosphate
  modified_base 7: mod_base = OTHER; note = 2'-O-methyladenosine-3'-phosphate
  modified_base 8: mod_base = OTHER; note = 2'-deoxy-2'-fluoroguanosine-3'-phosphate
  modified_base 9: mod_base = OTHER; note = 2'-O-methylcytidine-3'-phosphate
  modified_base 10: mod_base = OTHER; note = 2'-deoxy-2'-fluoroadenosine-3'-phosphate
  modified_base 11: mod_base = OTHER; note = 2'-deoxy-2'-fluoroadenosine-3'-phosphate
  modified_base 12: mod_base = OTHER; note = 2'-deoxy-2'-fluoroguanosine-3'-phosphate
  modified_base 13: mod_base = OTHER; note = 2'-O-methyladenosine-3'-phosphate
  modified_base 14: mod_base = OTHER; note = 2'-deoxy-2'-fluoroadenosine-3'-phosphate
  modified_base 15: mod_base = OTHER; note = 2'-O-methylcytidine-3'-phosphate
  modified_base 16: mod_base = OTHER; note = 2'-deoxy-2'-fluoroadenosine-3'-phosphate
  modified_base 17: mod_base = OTHER; note = 2'-O-methylcytidine-3'-phosphate
  modified_base 18: mod_base = OTHER; note = 2'-deoxy-2'-fluorouridine-3'-phosphate
  modified_base 19: mod_base = OTHER; note = 2'-O-methylguanosine-3'-phosphate
  modified_base 20: mod_base = OTHER; note = 2'-deoxy-2'-fluorouridine-3'-phosphate
  modified_base 21: mod_base = OTHER; note = 2'-O-methyluridine-3'-phosphorothioate
  modified_base 22: mod_base = OTHER; note = 2'-O-methyluridine-3'-phosphorothioate
  modified_base 23: mod_base = OTHER; note = 2'-O-methyluridine
ttatagagcaagaacactgtttt

SEQ ID NO: 761 - RNA, 23 nt, synthetic construct
  source 1..23: mol_type = other RNA
  modified_base 1: mod_base = OTHER; note = 2'-O-methyluridine-3'-phosphate
  modified_base 2: mod_base = OTHER; note = 2'-deoxy-2'-fluorouridine-3'-phosphate
  modified_base 3: mod_base = OTHER; note = 2'-O-methyladenosine-3'-phosphate
  modified_base 4: mod_base = OTHER; note = 2'-deoxy-2'-fluorouridine-3'-phosphate
  modified_base 5: mod_base = OTHER; note = 2'-O-methyladenosine-3'-phosphate
  modified_base 6: mod_base = OTHER; note = 2'-deoxy-2'-fluoroguanosine-3'-phosphate
  modified_base 7: mod_base = OTHER; note = 2'-O-methyladenosine-3'-phosphate
  modified_base 8: mod_base = OTHER; note = 2'-deoxy-2'-fluoroguanosine-3'-phosphate
  modified_base 9: mod_base = OTHER; note = 2'-O-methylcytidine-3'-phosphate
  modified_base 10: mod_base = OTHER; note = 2'-deoxy-2'-fluoroadenosine-3'-phosphate
  modified_base 11: mod_base = OTHER; note = 2'-O-methyladenosine-3'-phosphate
  modified_base 12: mod_base = OTHER; note = 2'-deoxy-2'-fluoroguanosine-3'-phosphate
  modified_base 13: mod_base = OTHER; note = 2'-O-methyladenosine-3'-phosphate
  modified_base 14: mod_base = OTHER; note = 2'-O-methyladenosine-3'-phosphate
  modified_base 15: mod_base = OTHER; note = 2'-O-methylcytidine-3'-phosphate
  modified_base 16: mod_base = OTHER; note = 2'-deoxy-2'-fluoroadenosine-3'-phosphate
  modified_base 17: mod_base = OTHER; note = 2'-O-methylcytidine-3'-phosphate
  modified_base 18: mod_base = OTHER; note = 2'-deoxy-2'-fluorouridine-3'-phosphate
  modified_base 19: mod_base = OTHER; note = 2'-O-methylguanosine-3'-phosphate
  modified_base 20: mod_base = OTHER; note = 2'-deoxy-2'-fluorouridine-3'-phosphate
  modified_base 21: mod_base = OTHER; note = 2'-O-methyluridine-3'-phosphorothioate
  modified_base 22: mod_base = OTHER; note = 2'-deoxy-2'-fluorouridine-3'-phosphorothioate
  modified_base 23: mod_base = OTHER; note = 2'-O-methyluridine
ttatagagcaagaacactgtttt

SEQ ID NO: 762 - RNA, 23 nt, synthetic construct
  source 1..23: mol_type = other RNA
  modified_base 1: mod_base = OTHER; note = 2'-O-methyluridine-3'-phosphate
  modified_base 2: mod_base = OTHER; note = 2'-deoxy-2'-fluorouridine-3'-phosphate
  modified_base 3: mod_base = OTHER; note = 2'-deoxy-2'-fluoroadenosine-3'-phosphate
  modified_base 4: mod_base = OTHER; note = 2'-deoxy-2'-fluorouridine-3'-phosphate
  modified_base 5: mod_base = OTHER; note = 2'-O-methyladenosine-3'-phosphate
  modified_base 6: mod_base = OTHER; note = 2'-deoxy-2'-fluoroguanosine-3'-phosphate
  modified_base 7: mod_base = OTHER; note = 2'-O-methyladenosine-3'-phosphate
  modified_base 8: mod_base = OTHER; note = 2'-deoxy-2'-fluoroguanosine-3'-phosphate
  modified_base 9: mod_base = OTHER; note = 2'-O-methylcytidine-3'-phosphate
  modified_base 10: mod_base = OTHER; note = 2'-deoxy-2'-fluoroadenosine-3'-phosphate
  modified_base 11: mod_base = OTHER; note = 2'-O-methyladenosine-3'-phosphate
  modified_base 12: mod_base = OTHER; note = 2'-deoxy-2'-fluoroguanosine-3'-phosphate
  modified_base 13: mod_base = OTHER; note = 2'-O-methyladenosine-3'-phosphate
  modified_base 14: mod_base = OTHER; note = 2'-deoxy-2'-fluoroadenosine-3'-phosphate
  modified_base 15: mod_base = OTHER; note = 2'-O-methylcytidine-3'-phosphate
  modified_base 16: mod_base = OTHER; note = 2'-deoxy-2'-fluoroadenosine-3'-phosphate
  modified_base 17: mod_base = OTHER; note = 2'-O-methylcytidine-3'-phosphate
  modified_base 18: mod_base = OTHER; note = 2'-deoxy-2'-fluorouridine-3'-phosphate
  modified_base 19: mod_base = OTHER; note = 2'-O-methylguanosine-3'-phosphate
  modified_base 20: mod_base = OTHER; note = 2'-deoxy-2'-fluorouridine-3'-phosphate
  modified_base 21: mod_base = OTHER; note = 2'-O-methyluridine-3'-phosphorothioate
  modified_base 22: mod_base = OTHER; note = 2'-deoxy-2'-fluorouridine-3'-phosphorothioate
  modified_base 23: mod_base = OTHER; note = 2'-O-methyluridine
ttatagagcaagaacactgtttt

SEQ ID NO: 763 - RNA, 23 nt, synthetic construct
  source 1..23: mol_type = other RNA
  modified_base 1: mod_base = OTHER; note = 2'-O-methyluridine-3'-phosphate
  modified_base 2: mod_base = OTHER; note = 2'-deoxy-2'-fluorouridine-3'-phosphate
  modified_base 3: mod_base = OTHER; note = 2'-O-methyladenosine-3'-phosphate
  modified_base 4: mod_base = OTHER; note = 2'-deoxy-2'-fluorouridine-3'-phosphate
  modified_base 5: mod_base = OTHER; note = 2'-O-methyladenosine-3'-phosphate
  modified_base 6: mod_base = OTHER; note = 2'-deoxy-2'-fluoroguanosine-3'-phosphate
  modified_base 7: mod_base = OTHER; note = 2'-O-methyladenosine-3'-phosphate
  modified_base 8: mod_base = OTHER; note = 2'-deoxy-2'-fluoroguanosine-3'-phosphate
  modified_base 9: mod_base = OTHER; note = 2'-deoxy-2'-fluorocytidine-3'-phosphate
  modified_base 10: mod_base = OTHER; note = 2'-deoxy-2'-fluoroadenosine-3'-phosphate
  modified_base 11: mod_base = OTHER; note = 2'-O-methyladenosine-3'-phosphate
  modified_base 12: mod_base = OTHER; note = 2'-deoxy-2'-fluoroguanosine-3'-phosphate
  modified_base 13: mod_base = OTHER; note = 2'-O-methyladenosine-3'-phosphate
  modified_base 14: mod_base = OTHER; note = 2'-deoxy-2'-fluoroadenosine-3'-phosphate
  modified_base 15: mod_base = OTHER; note = 2'-O-methylcytidine-3'-phosphate
  modified_base 16: mod_base = OTHER; note = 2'-deoxy-2'-fluoroadenosine-3'-phosphate
  modified_base 17: mod_base = OTHER; note = 2'-O-methylcytidine-3'-phosphate
  modified_base 18: mod_base = OTHER; note = 2'-deoxy-2'-fluorouridine-3'-phosphate
  modified_base 19: mod_base = OTHER; note = 2'-O-methylguanosine-3'-phosphate
  modified_base 20: mod_base = OTHER; note = 2'-O-methyluridine-3'-phosphate
  modified_base 21: mod_base = OTHER; note = 2'-O-methyluridine-3'-phosphorothioate
  modified_base 22: mod_base = OTHER; note = 2'-deoxy-2'-fluorouridine-3'-phosphorothioate
  modified_base 23: mod_base = OTHER; note = 2'-O-methyluridine
ttatagagcaagaacactgtttt

SEQ ID NO: 764 - RNA, 23 nt, synthetic construct
  source 1..23: mol_type = other RNA
  modified_base 1: mod_base = OTHER; note = 2'-O-methyluridine-3'-phosphate
  modified_base 2: mod_base = OTHER; note = 2'-deoxy-2'-fluorouridine-3'-phosphate
  modified_base 3: mod_base = OTHER; note = 2'-O-methyladenosine-3'-phosphate
  modified_base 4: mod_base = OTHER; note = 2'-deoxy-2'-fluorouridine-3'-phosphate
  modified_base 5: mod_base = OTHER; note = 2'-O-methyladenosine-3'-phosphate
  modified_base 6: mod_base = OTHER; note = 2'-deoxy-2'-fluoroguanosine-3'-phosphate
  modified_base 7: mod_base = OTHER; note = 2'-O-methyladenosine-3'-phosphate
  modified_base 8: mod_base = OTHER; note = 2'-deoxy-2'-fluoroguanosine-3'-phosphate
  modified_base 9: mod_base = OTHER; note = 2'-O-methylcytidine-3'-phosphate
  modified_base 10: mod_base = OTHER; note = 2'-deoxy-2'-fluoroadenosine-3'-phosphate
  modified_base 11: mod_base = OTHER; note = 2'-O-methyladenosine-3'-phosphate
  modified_base 12: mod_base = OTHER; note = 2'-O-methylguanosine-3'-phosphate
  modified_base 13: mod_base = OTHER; note = 2'-O-methyladenosine-3'-phosphate
  modified_base 14: mod_base = OTHER; note = 2'-deoxy-2'-fluoroadenosine-3'-phosphate
  modified_base 15: mod_base = OTHER; note = 2'-O-methylcytidine-3'-phosphate
  modified_base 16: mod_base = OTHER; note = 2'-deoxy-2'-fluoroadenosine-3'-phosphate
  modified_base 17: mod_base = OTHER; note = 2'-O-methylcytidine-3'-phosphate
  modified_base 18: mod_base = OTHER; note = 2'-deoxy-2'-fluorouridine-3'-phosphate
  modified_base 19: mod_base = OTHER; note = 2'-O-methylguanosine-3'-phosphate
  modified_base 20: mod_base = OTHER; note = 2'-deoxy-2'-fluorouridine-3'-phosphate
  modified_base 21: mod_base = OTHER; note = 2'-O-methyluridine-3'-phosphorothioate
  modified_base 22: mod_base = OTHER; note = 2'-deoxy-2'-fluorouridine-3'-phosphorothioate
  modified_base 23: mod_base = OTHER; note = 2'-O-methyluridine
ttatagagcaagaacactgtttt

SEQ ID NO: 765 - RNA, 23 nt, synthetic construct
  source 1..23: mol_type = other RNA
  modified_base 1: mod_base = OTHER; note = 2'-O-methyluridine-3'-phosphate
  modified_base 2: mod_base = OTHER; note = 2'-deoxy-2'-fluorouridine-3'-phosphate
  modified_base 3: mod_base = OTHER; note = 2'-O-methyladenosine-3'-phosphate
  modified_base 4: mod_base = OTHER; note = 2'-deoxy-2'-fluorouridine-3'-phosphate
  modified_base 5: mod_base = OTHER; note = 2'-deoxy-2'-fluoroadenosine-3'-phosphate
  modified_base 6: mod_base = OTHER; note = 2'-deoxy-2'-fluoroguanosine-3'-phosphate
  modified_base 7: mod_base = OTHER; note = 2'-O-methyladenosine-3'-phosphate
  modified_base 8: mod_base = OTHER; note = 2'-deoxy-2'-fluoroguanosine-3'-phosphate
  modified_base 9: mod_base = OTHER; note = 2'-O-methylcytidine-3'-phosphate
  modified_base 10: mod_base = OTHER; note = 2'-deoxy-2'-fluoroadenosine-3'-phosphate
  modified_base 11: mod_base = OTHER; note = 2'-O-methyladenosine-3'-phosphate
  modified_base 12: mod_base = OTHER; note = 2'-deoxy-2'-fluoroguanosine-3'-phosphate
  modified_base 13: mod_base = OTHER; note = 2'-O-methyladenosine-3'-phosphate
  modified_base 14: mod_base = OTHER; note = 2'-deoxy-2'-fluoroadenosine-3'-phosphate
  modified_base 15: mod_base = OTHER; note = 2'-O-methylcytidine-3'-phosphate
  modified_base 16: mod_base = OTHER; note = 2'-deoxy-2'-fluoroadenosine-3'-phosphate
  modified_base 17: mod_base = OTHER; note = 2'-O-methylcytidine-3'-phosphate
  modified_base 18: mod_base = OTHER; note = 2'-deoxy-2'-fluorouridine-3'-phosphate
  modified_base 19: mod_base = OTHER; note = 2'-O-methylguanosine-3'-phosphate
  modified_base 20: mod_base = OTHER; note = 2'-deoxy-2'-fluorouridine-3'-phosphate
  modified_base 21: mod_base = OTHER; note = 2'-O-methyluridine-3'-phosphorothioate
  modified_base 22: mod_base = OTHER; note = 2'-deoxy-2'-fluorouridine-3'-phosphorothioate
  modified_base 23: mod_base = OTHER; note = 2'-O-methyluridine
ttatagagcaagaacactgtttt

SEQ ID NO: 766 - RNA, 23 nt, synthetic construct
  source 1..23: mol_type = other RNA
  modified_base 1: mod_base = OTHER; note = 2'-O-methyluridine-3'-phosphate
  modified_base 2: mod_base = OTHER; note = 2'-deoxy-2'-fluorouridine-3'-phosphate
  modified_base 3: mod_base = OTHER; note = 2'-O-methyladenosine-3'-phosphate
  modified_base 4: mod_base = OTHER; note = 2'-deoxy-2'-fluorouridine-3'-phosphate
  modified_base 5: mod_base = OTHER; note = 2'-O-methyladenosine-3'-phosphate
  modified_base 6: mod_base = OTHER; note = 2'-deoxy-2'-fluoroguanosine-3'-phosphate
  modified_base 7: mod_base = OTHER; note = 2'-O-methyladenosine-3'-phosphate
  modified_base 8: mod_base = OTHER; note = 2'-deoxy-2'-fluoroguanosine-3'-phosphate
  modified_base 9: mod_base = OTHER; note = 2'-O-methylcytidine-3'-phosphate
  modified_base 10: mod_base = OTHER; note = 2'-deoxy-2'-fluoroadenosine-3'-phosphate
  modified_base 11: mod_base = OTHER; note = 2'-O-methyladenosine-3'-phosphate
  modified_base 12: mod_base = OTHER; note = 2'-deoxy-2'-fluoroguanosine-3'-phosphate
  modified_base 13: mod_base = OTHER; note = 2'-O-methyladenosine-3'-phosphate
  modified_base 14: mod_base = OTHER; note = 2'-deoxy-2'-fluoroadenosine-3'-phosphate
  modified_base 15: mod_base = OTHER; note = 2'-deoxy-2'-fluorocytidine-3'-phosphate
  modified_base 16: mod_base = OTHER; note = 2'-deoxy-2'-fluoroadenosine-3'-phosphate
  modified_base 17: mod_base = OTHER; note = 2'-O-methylcytidine-3'-phosphate
  modified_base 18: mod_base = OTHER; note = 2'-deoxy-2'-fluorouridine-3'-phosphate
  modified_base 19: mod_base = OTHER; note = 2'-O-methylguanosine-3'-phosphate
  modified_base 20: mod_base = OTHER; note = 2'-deoxy-2'-fluorouridine-3'-phosphate
  modified_base 21: mod_base = OTHER; note = 2'-O-methyluridine-3'-phosphorothioate
  modified_base 22: mod_base = OTHER; note = 2'-O-methyluridine-3'-phosphorothioate
  modified_base 23: mod_base = OTHER; note = 2'-O-methyluridine
ttatagagcaagaacactgtttt

SEQ ID NO: 767 - RNA, 23 nt, synthetic construct
  source 1..23: mol_type = other RNA
  modified_base 1: mod_base = OTHER; note = 2'-O-methyluridine-3'-phosphate
  modified_base 2: mod_base = OTHER; note = 2'-deoxy-2'-fluorouridine-3'-phosphate
  modified_base 3: mod_base = OTHER; note = 2'-O-methyladenosine-3'-phosphate
  modified_base 4: mod_base = OTHER; note = 2'-deoxy-2'-fluorouridine-3'-phosphate
  modified_base 5: mod_base = OTHER; note = 2'-O-methyladenosine-3'-phosphate
  modified_base 6: mod_base = OTHER; note = 2'-deoxy-2'-fluoroguanosine-3'-phosphate
  modified_base 7: mod_base = OTHER; note = 2'-O-methyladenosine-3'-phosphate
  modified_base 8: mod_base = OTHER; note = 2'-deoxy-2'-fluoroguanosine-3'-phosphate
  modified_base 9: mod_base = OTHER; note = 2'-O-methylcytidine-3'-phosphate
  modified_base 10: mod_base = OTHER; note = 2'-deoxy-2'-fluoroadenosine-3'-phosphate
  modified_base 11: mod_base = OTHER; note = 2'-deoxy-2'-fluoroadenosine-3'-phosphate
  modified_base 12: mod_base = OTHER; note = 2'-deoxy-2'-fluoroguanosine-3'-phosphate
  modified_base 13: mod_base = OTHER; note = 2'-O-methyladenosine-3'-phosphate
  modified_base 14: mod_base = OTHER; note = 2'-deoxy-2'-fluoroadenosine-3'-phosphate
  modified_base 15: mod_base = OTHER; note = 2'-O-methylcytidine-3'-phosphate
  modified_base 16: mod_base = OTHER; note = 2'-deoxy-2'-fluoroadenosine-3'-phosphate
  modified_base 17: mod_base = OTHER; note = 2'-O-methylcytidine-3'-phosphate
  modified_base 18: mod_base = OTHER; note = 2'-deoxy-2'-fluorouridine-3'-phosphate
  modified_base 19: mod_base = OTHER; note = 2'-O-methylguanosine-3'-phosphate
  modified_base 20: mod_base = OTHER; note = 2'-O-methyluridine-3'-phosphate
  modified_base 21: mod_base = OTHER; note = 2'-O-methyluridine-3'-phosphorothioate
  modified_base 22: mod_base = OTHER; note = 2'-deoxy-2'-fluorouridine-3'-phosphorothioate
  modified_base 23: mod_base = OTHER; note = 2'-O-methyluridine
ttatagagcaagaacactgtttt

SEQ ID NO: 768 - RNA, 23 nt, synthetic construct
  source 1..23: mol_type = other RNA
  modified_base 1: mod_base = OTHER; note = 2'-O-methyluridine-3'-phosphate
  modified_base 2: mod_base = OTHER; note = 2'-deoxy-2'-fluorouridine-3'-phosphate
  modified_base 3: mod_base = OTHER; note = 2'-O-methyladenosine-3'-phosphate
  modified_base 4: mod_base = OTHER; note = 2'-deoxy-2'-fluorouridine-3'-phosphate
  modified_base 5: mod_base = OTHER; note = 2'-O-methyladenosine-3'-phosphate
  modified_base 6: mod_base = OTHER; note = 2'-deoxy-2'-fluoroguanosine-3'-phosphate
  modified_base 7: mod_base = OTHER; note = 2'-O-methyladenosine-3'-phosphate
  modified_base 8: mod_base = OTHER; note = 2'-deoxy-2'-fluoroguanosine-3'-phosphate
  modified_base 9: mod_base = OTHER; note = 2'-O-methylcytidine-3'-phosphate
  modified_base 10: mod_base = OTHER; note = 2'-deoxy-2'-fluoroadenosine-3'-phosphate
  modified_base 11: mod_base = OTHER; note = 2'-O-methyladenosine-3'-phosphate
  modified_base 12: mod_base = OTHER; note = 2'-deoxy-2'-fluoroguanosine-3'-phosphate
  modified_base 13: mod_base = OTHER; note = 2'-O-methyladenosine-3'-phosphate
  modified_base 14: mod_base = OTHER; note = 2'-O-methyladenosine-3'-phosphate
  modified_base 15: mod_base = OTHER; note = 2'-O-methylcytidine-3'-phosphate
  modified_base 16: mod_base = OTHER; note = 2'-deoxy-2'-fluoroadenosine-3'-phosphate
  modified_base 17: mod_base = OTHER; note = 2'-O-methylcytidine-3'-phosphate
  modified_base 18: mod_base = OTHER; note = 2'-deoxy-2'-fluorouridine-3'-phosphate
  modified_base 19: mod_base = OTHER; note = 2'-deoxy-2'-fluoroguanosine-3'-phosphate
  modified_base 20: mod_base = OTHER; note = 2'-deoxy-2'-fluorouridine-3'-phosphate
  modified_base 21: mod_base = OTHER; note = 2'-O-methyluridine-3'-phosphorothioate
  modified_base 22: mod_base = OTHER; note = 2'-deoxy-2'-fluorouridine-3'-phosphorothioate
  modified_base 23: mod_base = OTHER; note = 2'-O-methyluridine
ttatagagcaagaacactgtttt

SEQ ID NO: 769 - RNA, 23 nt, synthetic construct
  source 1..23: mol_type = other RNA
  modified_base 1: mod_base = OTHER; note = 2'-O-methyluridine-3'-phosphate
  modified_base 2: mod_base = OTHER; note = 2'-deoxy-2'-fluorouridine-3'-phosphate
  modified_base 3: mod_base = OTHER; note = 2'-O-methyladenosine-3'-phosphate
  modified_base 4: mod_base = OTHER; note = 2'-deoxy-2'-fluorouridine-3'-phosphate
  modified_base 5: mod_base = OTHER; note = 2'-O-methyladenosine-3'-phosphate
  modified_base 6: mod_base = OTHER; note = 2'-deoxy-2'-fluoroguanosine-3'-phosphate
  modified_base 7: mod_base = OTHER; note = 2'-O-methyladenosine-3'-phosphate
  modified_base 8: mod_base = OTHER; note = 2'-deoxy-2'-fluoroguanosine-3'-phosphate
  modified_base 9: mod_base = OTHER; note = 2'-O-methylcytidine-3'-phosphate
  modified_base 10: mod_base = OTHER; note = 2'-O-methyladenosine-3'-phosphate
  modified_base 11: mod_base = OTHER; note = 2'-O-methyladenosine-3'-phosphate
  modified_base 12: mod_base = OTHER; note = 2'-deoxy-2'-fluoroguanosine-3'-phosphate
  modified_base 13: mod_base = OTHER; note = 2'-deoxy-2'-fluoroadenosine-3'-phosphate
  modified_base 14: mod_base = OTHER; note = 2'-deoxy-2'-fluoroadenosine-3'-phosphate
  modified_base 15: mod_base = OTHER; note = 2'-O-methylcytidine-3'-phosphate
  modified_base 16: mod_base = OTHER; note = 2'-deoxy-2'-fluoroadenosine-3'-phosphate
  modified_base 17: mod_base = OTHER; note = 2'-O-methylcytidine-3'-phosphate
  modified_base 18: mod_base = OTHER; note = 2'-deoxy-2'-fluorouridine-3'-phosphate
  modified_base 19: mod_base = OTHER; note = 2'-O-methylguanosine-3'-phosphate
  modified_base 20: mod_base = OTHER; note = 2'-deoxy-2'-fluorouridine-3'-phosphate
  modified_base 21: mod_base = OTHER; note = 2'-O-methyluridine-3'-phosphorothioate
  modified_base 22: mod_base = OTHER; note = 2'-deoxy-2'-fluorouridine-3'-phosphorothioate
  modified_base 23: mod_base = OTHER; note = 2'-O-methyluridine
ttatagagcaagaacactgtttt

SEQ ID NO: 770 - RNA, 23 nt, synthetic construct
  source 1..23: mol_type = other RNA
  modified_base 1: mod_base = OTHER; note = 2'-O-methyluridine-3'-phosphate
  modified_base 2: mod_base = OTHER; note = 2'-deoxy-2'-fluorouridine-3'-phosphate
  modified_base 3: mod_base = OTHER; note = 2'-O-methyladenosine-3'-phosphate
  modified_base 4: mod_base = OTHER; note = 2'-deoxy-2'-fluorouridine-3'-phosphate
  modified_base 5: mod_base = OTHER; note = 2'-O-methyladenosine-3'-phosphate
  modified_base 6: mod_base = OTHER; note = 2'-deoxy-2'-fluoroguanosine-3'-phosphate
  modified_base 7: mod_base = OTHER; note = 2'-O-methyladenosine-3'-phosphate
  modified_base 8: mod_base = OTHER; note = 2'-deoxy-2'-fluoroguanosine-3'-phosphate
  modified_base 9: mod_base = OTHER; note = 2'-O-methylcytidine-3'-phosphate
  modified_base 10: mod_base = OTHER; note = 2'-deoxy-2'-fluoroadenosine-3'-phosphate
  modified_base 11: mod_base = OTHER; note = 2'-deoxy-2'-fluoroadenosine-3'-phosphate
  modified_base 12: mod_base = OTHER; note = 2'-deoxy-2'-fluoroguanosine-3'-phosphate
  modified_base 13: mod_base = OTHER; note = 2'-O-methyladenosine-3'-phosphate
  modified_base 14: mod_base = OTHER; note = 2'-deoxy-2'-fluoroadenosine-3'-phosphate
  modified_base 15: mod_base = OTHER; note = 2'-O-methylcytidine-3'-phosphate
  modified_base 16: mod_base = OTHER; note = 2'-deoxy-2'-fluoroadenosine-3'-phosphate
  modified_base 17: mod_base = OTHER; note = 2'-O-methylcytidine-3'-phosphate
  modified_base 18: mod_base = OTHER; note = 2'-O-methyluridine-3'-phosphate
  modified_base 19: mod_base = OTHER; note = 2'-O-methylguanosine-3'-phosphate
  modified_base 20: mod_base = OTHER; note = 2'-deoxy-2'-fluorouridine-3'-phosphate
  modified_base 21: mod_base = OTHER; note = 2'-O-methyluridine-3'-phosphorothioate
  modified_base 22: mod_base = OTHER; note = 2'-deoxy-2'-fluorouridine-3'-phosphorothioate
  modified_base 23: mod_base = OTHER; note = 2'-O-methyluridine
ttatagagcaagaacactgtttt

SEQ ID NO: 771 - RNA, 23 nt, synthetic construct
  source 1..23: mol_type = other RNA
  modified_base 1: mod_base = OTHER; note = 2'-O-methyluridine-3'-phosphate
  modified_base 2: mod_base = OTHER; note = 2'-deoxy-2'-fluorouridine-3'-phosphate
  modified_base 3: mod_base = OTHER; note = 2'-deoxy-2'-fluoroadenosine-3'-phosphate
  modified_base 4: mod_base = OTHER; note = 2'-deoxy-2'-fluorouridine-3'-phosphate
  modified_base 5: mod_base = OTHER; note = 2'-O-methyladenosine-3'-phosphate
  modified_base 6: mod_base = OTHER; note = 2'-deoxy-2'-fluoroguanosine-3'-phosphate
  modified_base 7: mod_base = OTHER; note = 2'-O-methyladenosine-3'-phosphate
  modified_base 8: mod_base = OTHER; note = 2'-deoxy-2'-fluoroguanosine-3'-phosphate
  modified_base 9: mod_base = OTHER; note = 2'-O-methylcytidine-3'-phosphate
  modified_base 10: mod_base = OTHER; note = 2'-deoxy-2'-fluoroadenosine-3'-phosphate
  modified_base 11: mod_base = OTHER; note = 2'-O-methyladenosine-3'-phosphate
  modified_base 12: mod_base = OTHER; note = 2'-deoxy-2'-fluoroguanosine-3'-phosphate
  modified_base 13: mod_base = OTHER; note = 2'-O-methyladenosine-3'-phosphate
  modified_base 14: mod_base = OTHER; note = 2'-O-methyladenosine-3'-phosphate
  modified_base 15: mod_base = OTHER; note = 2'-O-methylcytidine-3'-phosphate
  modified_base 16: mod_base = OTHER; note = 2'-deoxy-2'-fluoroadenosine-3'-phosphate
  modified_base 17: mod_base = OTHER; note = 2'-O-methylcytidine-3'-phosphate
  modified_base 18: mod_base = OTHER; note = 2'-deoxy-2'-fluorouridine-3'-phosphate
  modified_base 19: mod_base = OTHER; note = 2'-O-methylguanosine-3'-phosphate
  modified_base 20: mod_base = OTHER; note = 2'-deoxy-2'-fluorouridine-3'-phosphate
  modified_base 21: mod_base = OTHER; note = 2'-O-methyluridine-3'-phosphorothioate
  modified_base 22: mod_base = OTHER; note = 2'-deoxy-2'-fluorouridine-3'-phosphorothioate
  modified_base 23: mod_base = OTHER; note = 2'-O-methyluridine
ttatagagcaagaacactgtttt

SEQ ID NO: 772 - RNA, 23 nt, synthetic construct
  source 1..23: mol_type = other RNA
  modified_base 1: mod_base = OTHER; note = 2'-O-methyluridine-3'-phosphate
  modified_base 2: mod_base = OTHER; note = 2'-deoxy-2'-fluorouridine-3'-phosphate
  modified_base 3: mod_base = OTHER; note = 2'-O-methyladenosine-3'-phosphate
  modified_base 4: mod_base = OTHER; note = 2'-deoxy-2'-fluorouridine-3'-phosphate
  modified_base 5: mod_base = OTHER; note = 2'-O-methyladenosine-3'-phosphate
  modified_base 6: mod_base = OTHER; note = 2'-deoxy-2'-fluoroguanosine-3'-phosphate
  modified_base 7: mod_base = OTHER; note = 2'-O-methyladenosine-3'-phosphate
  modified_base 8: mod_base = OTHER; note = 2'-deoxy-2'-fluoroguanosine-3'-phosphate
  modified_base 9: mod_base = OTHER; note = 2'-O-methylcytidine-3'-phosphate
  modified_base 10: mod_base = OTHER; note = 2'-deoxy-2'-fluoroadenosine-3'-phosphate
  modified_base 11: mod_base = OTHER; note = 2'-O-methyladenosine-3'-phosphate
  modified_base 12: mod_base = OTHER; note = 2'-deoxy-2'-fluoroguanosine-3'-phosphate
  modified_base 13: mod_base = OTHER; note = 2'-O-methyladenosine-3'-phosphate
  modified_base 14: mod_base = OTHER; note = 2'-O-methyladenosine-3'-phosphate
  modified_base 15: mod_base = OTHER; note = 2'-O-methylcytidine-3'-phosphate
  modified_base 16: mod_base = OTHER; note = 2'-deoxy-2'-fluoroadenosine-3'-phosphate
  modified_base 17: mod_base = OTHER; note = 2'-O-methylcytidine-3'-phosphate
  modified_base 18: mod_base = OTHER; note = 2'-deoxy-2'-fluorouridine-3'-phosphate
  modified_base 19: mod_base = OTHER; note = 2'-O-methylguanosine-3'-phosphate
  modified_base 20: mod_base = OTHER; note = 2'-deoxy-2'-fluorouridine-3'-phosphate
  modified_base 21: mod_base = OTHER; note = 2'-O-methyluridine-3'-phosphorothioate
  modified_base 22: mod_base = OTHER; note = 2'-deoxy-2'-fluorouridine-3'-phosphorothioate
  modified_base 23: mod_base = OTHER; note = 2'-deoxy-2'-fluorouridine
ttatagagcaagaacactgtttt

SEQ ID NO: 773 - RNA, 23 nt, synthetic construct
  source 1..23: mol_type = other RNA
  modified_base 1: mod_base = OTHER; note = 2'-O-methyluridine-3'-phosphate
  modified_base 2: mod_base = OTHER; note = 2'-deoxy-2'-fluorouridine-3'-phosphate
  modified_base 3: mod_base = OTHER; note = 2'-O-methyladenosine-3'-phosphate
  modified_base 4: mod_base = OTHER; note = 2'-deoxy-2'-fluorouridine-3'-phosphate
  modified_base 5: mod_base = OTHER; note = 2'-O-methyladenosine-3'-phosphate
  modified_base 6: mod_base = OTHER; note = 2'-deoxy-2'-fluoroguanosine-3'-phosphate
  modified_base 7: mod_base = OTHER; note = 2'-O-methyladenosine-3'-phosphate
  modified_base 8: mod_base = OTHER; note = 2'-deoxy-2'-fluoroguanosine-3'-phosphate
  modified_base 9: mod_base = OTHER; note = 2'-O-methylcytidine-3'-phosphate
  modified_base 10: mod_base = OTHER; note = 2'-deoxy-2'-fluoroadenosine-3'-phosphate
  modified_base 11: mod_base = OTHER; note = 2'-O-methyladenosine-3'-phosphate
  modified_base 12: mod_base = OTHER; note = 2'-deoxy-2'-fluoroguanosine-3'-phosphate
  modified_base 13: mod_base = OTHER; note = 2'-deoxy-2'-fluoroadenosine-3'-phosphate
  modified_base 14: mod_base = OTHER; note = 2'-deoxy-2'-fluoroadenosine-3'-phosphate
  modified_base 15: mod_base = OTHER; note = 2'-O-methylcytidine-3'-phosphate
  modified_base 16: mod_base = OTHER; note = 2'-deoxy-2'-fluoroadenosine-3'-phosphate
  modified_base 17: mod_base = OTHER; note = 2'-O-methylcytidine-3'-phosphate
  modified_base 18: mod_base = OTHER; note = 2'-O-methyluridine-3'-phosphate
  modified_base 19: mod_base = OTHER; note = 2'-O-methylguanosine-3'-phosphate
  modified_base 20: mod_base = OTHER; note = 2'-deoxy-2'-fluorouridine-3'-phosphate
  modified_base 21: mod_base = OTHER; note = 2'-O-methyluridine-3'-phosphorothioate
  modified_base 22: mod_base = OTHER; note = 2'-deoxy-2'-fluorouridine-3'-phosphorothioate
  modified_base 23: mod_base = OTHER; note = 2'-O-methyluridine
ttatagagcaagaacactgtttt

SEQ ID NO: 774 - RNA, 23 nt, synthetic construct
  source 1..23: mol_type = other RNA
  modified_base 1: mod_base = OTHER; note = 2'-O-methyluridine-3'-phosphate
  modified_base 2: mod_base = OTHER; note = 2'-deoxy-2'-fluorouridine-3'-phosphate
  modified_base 3: mod_base = OTHER; note = 2'-O-methyladenosine-3'-phosphate
  modified_base 4: mod_base = OTHER; note = 2'-deoxy-2'-fluorouridine-3'-phosphate
  modified_base 5: mod_base = OTHER; note = 2'-deoxy-2'-fluoroadenosine-3'-phosphate
  modified_base 6: mod_base = OTHER; note = 2'-deoxy-2'-fluoroguanosine-3'-phosphate
  modified_base 7: mod_base = OTHER; note = 2'-O-methyladenosine-3'-phosphate
  modified_base 8: mod_base = OTHER; note = 2'-deoxy-2'-fluoroguanosine-3'-phosphate
  modified_base 9: mod_base = OTHER; note = 2'-O-methylcytidine-3'-phosphate
  modified_base 10: mod_base = OTHER; note = 2'-deoxy-2'-fluoroadenosine-3'-phosphate
  modified_base 11: mod_base = OTHER; note = 2'-O-methyladenosine-3'-phosphate
  modified_base 12: mod_base = OTHER; note = 2'-deoxy-2'-fluoroguanosine-3'-phosphate
  modified_base 13: mod_base = OTHER; note = 2'-O-methyladenosine-3'-phosphate
  modified_base 14: mod_base = OTHER; note = 2'-O-methyladenosine-3'-phosphate
  modified_base 15: mod_base = OTHER; note = 2'-O-methylcytidine-3'-phosphate
  modified_base 16: mod_base = OTHER; note = 2'-deoxy-2'-fluoroadenosine-3'-phosphate
  modified_base 17: mod_base = OTHER; note = 2'-O-methylcytidine-3'-phosphate
  modified_base 18: mod_base = OTHER; note = 2'-deoxy-2'-fluorouridine-3'-phosphate
  modified_base 19: mod_base = OTHER; note = 2'-O-methylguanosine-3'-phosphate
  modified_base 20: mod_base = OTHER; note = 2'-deoxy-2'-fluorouridine-3'-phosphate
  modified_base 21: mod_base = OTHER; note = 2'-O-methyluridine-3'-phosphorothioate
  modified_base 22: mod_base = OTHER; note = 2'-deoxy-2'-fluorouridine-3'-phosphorothioate
  modified_base 23: mod_base = OTHER; note = 2'-O-methyluridine
ttatagagcaagaacactgtttt

SEQ ID NO: 775 - RNA, 23 nt, synthetic construct
  source 1..23: mol_type = other RNA
  modified_base 1: mod_base = OTHER; note = 2'-O-methyluridine-3'-phosphate
  modified_base 2: mod_base = OTHER; note = 2'-deoxy-2'-fluorouridine-3'-phosphate
  modified_base 3: mod_base = OTHER; note = 2'-O-methyladenosine-3'-phosphate
  modified_base 4: mod_base = OTHER; note = 2'-deoxy-2'-fluorouridine-3'-phosphate
  modified_base 5: mod_base = OTHER; note = 2'-O-methyladenosine-3'-phosphate
  modified_base 6: mod_base = OTHER; note = 2'-deoxy-2'-fluoroguanosine-3'-phosphate
  modified_base 7: mod_base = OTHER; note = 2'-O-methyladenosine-3'-phosphate
  modified_base 8: mod_base = OTHER; note = 2'-deoxy-2'-fluoroguanosine-3'-phosphate
  modified_base 9: mod_base = OTHER; note = 2'-O-methylcytidine-3'-phosphate
  modified_base 10: mod_base = OTHER; note = 2'-O-methyladenosine-3'-phosphate
  modified_base 11: mod_base = OTHER; note = 2'-O-methyladenosine-3'-phosphate
  modified_base 12: mod_base = OTHER; note = 2'-deoxy-2'-fluoroguanosine-3'-phosphate
  modified_base 13: mod_base = OTHER; note = 2'-O-methyladenosine-3'-phosphate
  modified_base 14: mod_base = OTHER; note = 2'-deoxy-2'-fluoroadenosine-3'-phosphate
  modified_base 15: mod_base = OTHER; note = 2'-O-methylcytidine-3'-phosphate
  modified_base 16: mod_base = OTHER; note = 2'-deoxy-2'-fluoroadenosine-3'-phosphate
  modified_base 17: mod_base = OTHER; note = 2'-deoxy-2'-fluorocytidine-3'-phosphate
  modified_base 18: mod_base = OTHER; note = 2'-deoxy-2'-fluorouridine-3'-phosphate
  modified_base 19: mod_base = OTHER; note = 2'-O-methylguanosine-3'-phosphate
  modified_base 20: mod_base = OTHER; note = 2'-deoxy-2'-fluorouridine-3'-phosphate
  modified_base 21: mod_base = OTHER; note = 2'-O-methyluridine-3'-phosphorothioate
  modified_base 22: mod_base = OTHER; note = 2'-deoxy-2'-fluorouridine-3'-phosphorothioate
  modified_base 23: mod_base = OTHER; note = 2'-O-methyluridine
ttatagagcaagaacactgtttt

SEQ ID NO: 776 - RNA, 23 nt, synthetic construct
  source 1..23: mol_type = other RNA
  modified_base 1: mod_base = OTHER; note = 2'-O-methyluridine-3'-phosphate
  modified_base 2: mod_base = OTHER; note = 2'-deoxy-2'-fluorouridine-3'-phosphate
  modified_base 3: mod_base = OTHER; note = 2'-O-methyladenosine-3'-phosphate
  modified_base 4: mod_base = OTHER; note = 2'-deoxy-2'-fluorouridine-3'-phosphate
  modified_base 5: mod_base = OTHER; note = 2'-O-methyladenosine-3'-phosphate
  modified_base 6: mod_base = OTHER; note = 2'-deoxy-2'-fluoroguanosine-3'-phosphate
  modified_base 7: mod_base = OTHER; note = 2'-O-methyladenosine-3'-phosphate
  modified_base 8: mod_base = OTHER; note = 2'-deoxy-2'-fluoroguanosine-3'-phosphate
  modified_base 9: mod_base = OTHER; note = 2'-O-methylcytidine-3'-phosphate
  modified_base 10: mod_base = OTHER; note = 2'-deoxy-2'-fluoroadenosine-3'-phosphate
  modified_base 11: mod_base = OTHER; note = 2'-O-methyladenosine-3'-phosphate
  modified_base 12: mod_base = OTHER; note = 2'-deoxy-2'-fluoroguanosine-3'-phosphate
  modified_base 13: mod_base = OTHER; note = 2'-O-methyladenosine-3'-phosphate
  modified_base 14: mod_base = OTHER; note = 2'-deoxy-2'-fluoroadenosine-3'-phosphate
  modified_base 15: mod_base = OTHER; note = 2'-deoxy-2'-fluorocytidine-3'-phosphate
  modified_base 16: mod_base = OTHER; note = 2'-deoxy-2'-fluoroadenosine-3'-phosphate
  modified_base 17: mod_base = OTHER; note = 2'-O-methylcytidine-3'-phosphate
  modified_base 18: mod_base = OTHER; note = 2'-O-methyluridine-3'-phosphate
  modified_base 19: mod_base = OTHER; note = 2'-O-methylguanosine-3'-phosphate
  modified_base 20: mod_base = OTHER; note = 2'-deoxy-2'-fluorouridine-3'-phosphate
  modified_base 21: mod_base = OTHER; note = 2'-O-methyluridine-3'-phosphorothioate
  modified_base 22: mod_base = OTHER; note = 2'-deoxy-2'-fluorouridine-3'-phosphorothioate
  modified_base 23: mod_base = OTHER; note = 2'-O-methyluridine
ttatagagcaagaacactgtttt

SEQ ID NO: 777 - RNA, 23 nt, synthetic construct
  source 1..23: mol_type = other RNA
  modified_base 1: mod_base = OTHER; note = 2'-O-methyluridine-3'-phosphate
  modified_base 2: mod_base = OTHER; note = 2'-deoxy-2'-fluorouridine-3'-phosphate
  modified_base 3: mod_base = OTHER; note = 2'-O-methyladenosine-3'-phosphate
  modified_base 4: mod_base = OTHER; note = 2'-deoxy-2'-fluorouridine-3'-phosphate
  modified_base 5: mod_base = OTHER; note = 2'-O-methyladenosine-3'-phosphate
  modified_base 6: mod_base = OTHER; note = 2'-deoxy-2'-fluoroguanosine-3'-phosphate
  modified_base 7: mod_base = OTHER; note = 2'-O-methyladenosine-3'-phosphate
  modified_base 8: mod_base = OTHER; note = 2'-deoxy-2'-fluoroguanosine-3'-phosphate
  modified_base 9: mod_base = OTHER; note = 2'-O-methylcytidine-3'-phosphate
  modified_base 10: mod_base = OTHER; note = 2'-deoxy-2'-fluoroadenosine-3'-phosphate
  modified_base 11: mod_base = OTHER; note = 2'-deoxy-2'-fluoroadenosine-3'-phosphate
  modified_base 12: mod_base = OTHER; note = 2'-deoxy-2'-fluoroguanosine-3'-phosphate
  modified_base 13: mod_base = OTHER; note = 2'-O-methyladenosine-3'-phosphate
  modified_base 14: mod_base = OTHER; note = 2'-deoxy-2'-fluoroadenosine-3'-phosphate
  modified_base 15: mod_base = OTHER; note = 2'-O-methylcytidine-3'-phosphate
  modified_base 16: mod_base = OTHER; note = 2'-O-methyladenosine-3'-phosphate
  modified_base 17: mod_base = OTHER; note = 2'-O-methylcytidine-3'-phosphate
  modified_base 18: mod_base = OTHER; note = 2'-deoxy-2'-fluorouridine-3'-phosphate
  modified_base 19: mod_base = OTHER; note = 2'-O-methylguanosine-3'-phosphate
  modified_base 20: mod_base = OTHER; note = 2'-deoxy-2'-fluorouridine-3'-phosphate
  modified_base 21: mod_base = OTHER; note = 2'-O-methyluridine-3'-phosphorothioate
  modified_base 22: mod_base = OTHER; note = 2'-deoxy-2'-fluorouridine-3'-phosphorothioate
  modified_base 23: mod_base = OTHER; note = 2'-O-methyluridine
ttatagagcaagaacactgtttt

SEQ ID NO: 778 - RNA, 23 nt, synthetic construct
  source 1..23: mol_type = other RNA
  modified_base 1: mod_base = OTHER; note = 2'-O-methyluridine-3'-phosphate
  modified_base 2: mod_base = OTHER; note = 2'-deoxy-2'-fluorouridine-3'-phosphate
  modified_base 3: mod_base = OTHER; note = 2'-O-methyladenosine-3'-phosphate
  modified_base 4: mod_base = OTHER; note = 2'-deoxy-2'-fluorouridine-3'-phosphate
  modified_base 5: mod_base = OTHER; note = 2'-O-methyladenosine-3'-phosphate
  modified_base 6: mod_base = OTHER; note = 2'-deoxy-2'-fluoroguanosine-3'-phosphate
  modified_base 7: mod_base = OTHER; note = 2'-deoxy-2'-fluoroadenosine-3'-phosphate
  modified_base 8: mod_base = OTHER; note = 2'-deoxy-2'-fluoroguanosine-3'-phosphate
  modified_base 9: mod_base = OTHER; note = 2'-O-methylcytidine-3'-phosphate
  modified_base 10: mod_base = OTHER; note = 2'-deoxy-2'-fluoroadenosine-3'-phosphate
  modified_base 11: mod_base = OTHER; note = 2'-O-methyladenosine-3'-phosphate
  modified_base 12: mod_base = OTHER; note = 2'-deoxy-2'-fluoroguanosine-3'-phosphate
  modified_base 13: mod_base = OTHER; note = 2'-O-methyladenosine-3'-phosphate
  modified_base 14: mod_base = OTHER; note = 2'-O-methyladenosine-3'-phosphate
  modified_base 15: mod_base = OTHER; note = 2'-O-methylcytidine-3'-phosphate
  modified_base 16: mod_base = OTHER; note = 2'-deoxy-2'-fluoroadenosine-3'-phosphate
  modified_base 17: mod_base = OTHER; note = 2'-O-methylcytidine-3'-phosphate
  modified_base 18: mod_base = OTHER; note = 2'-deoxy-2'-fluorouridine-3'-phosphate
  modified_base 19: mod_base = OTHER; note = 2'-O-methylguanosine-3'-phosphate
  modified_base 20: mod_base = OTHER; note = 2'-deoxy-2'-fluorouridine-3'-phosphate
  modified_base 21: mod_base = OTHER; note = 2'-O-methyluridine-3'-phosphorothioate
  modified_base 22: mod_base = OTHER; note = 2'-deoxy-2'-fluorouridine-3'-phosphorothioate
  modified_base 23: mod_base = OTHER; note = 2'-O-methyluridine
ttatagagcaagaacactgtttt

SEQ ID NO: 779 - RNA, 23 nt, synthetic construct
  source 1..23: mol_type = other RNA
  modified_base 1: mod_base = OTHER; note = 2'-O-methyluridine-3'-phosphate
  modified_base 2: mod_base = OTHER; note = 2'-deoxy-2'-fluorouridine-3'-phosphate
  modified_base 3: mod_base = OTHER; note = 2'-O-methyladenosine-3'-phosphate
  modified_base 4: mod_base = OTHER; note = 2'-deoxy-2'-fluorouridine-3'-phosphate
  modified_base 5: mod_base = OTHER; note = 2'-O-methyladenosine-3'-phosphate
  modified_base 6: mod_base = OTHER; note = 2'-deoxy-2'-fluoroguanosine-3'-phosphate
  modified_base 7: mod_base = OTHER; note = 2'-O-methyladenosine-3'-phosphate
  modified_base 8: mod_base = OTHER; note = 2'-deoxy-2'-fluoroguanosine-3'-phosphate
  modified_base 9: mod_base = OTHER; note = 2'-O-methylcytidine-3'-phosphate
  modified_base 10: mod_base = OTHER; note = 2'-O-methyladenosine-3'-phosphate
  modified_base 11: mod_base = OTHER; note = 2'-O-methyladenosine-3'-phosphate
  modified_base 12: mod_base = OTHER; note = 2'-deoxy-2'-fluoroguanosine-3'-phosphate
  modified_base 13: mod_base = OTHER; note = 2'-O-methyladenosine-3'-phosphate
  modified_base 14: mod_base = OTHER; note = 2'-deoxy-2'-fluoroadenosine-3'-phosphate
  modified_base 15: mod_base = OTHER; note = 2'-O-methylcytidine-3'-phosphate
  modified_base 16: mod_base = OTHER; note = 2'-deoxy-2'-fluoroadenosine-3'-phosphate
  modified_base 17: mod_base = OTHER; note = 2'-O-methylcytidine-3'-phosphate
  modified_base 18: mod_base = OTHER; note = 2'-deoxy-2'-fluorouridine-3'-phosphate
  modified_base 19: mod_base = OTHER; note = 2'-deoxy-2'-fluoroguanosine-3'-phosphate
  modified_base 20: mod_base = OTHER; note = 2'-deoxy-2'-fluorouridine-3'-phosphate
  modified_base 21: mod_base = OTHER; note = 2'-O-methyluridine-3'-phosphorothioate
  modified_base 22: mod_base = OTHER; note = 2'-deoxy-2'-fluorouridine-3'-phosphorothioate
  modified_base 23: mod_base = OTHER; note = 2'-O-methyluridine
ttatagagcaagaacactgtttt

SEQ ID NO: 780 - RNA, 23 nt, synthetic construct
  source 1..23: mol_type = other RNA
  modified_base 1: mod_base = OTHER; note = 2'-O-methyluridine-3'-phosphate
  modified_base 2: mod_base = OTHER; note = 2'-deoxy-2'-fluorouridine-3'-phosphate
  modified_base 3: mod_base = OTHER; note = 2'-O-methyladenosine-3'-phosphate
  modified_base 4: mod_base = OTHER; note = 2'-deoxy-2'-fluorouridine-3'-phosphate
  modified_base 5: mod_base = OTHER; note = 2'-O-methyladenosine-3'-phosphate
  modified_base 6: mod_base = OTHER; note = 2'-deoxy-2'-fluoroguanosine-3'-phosphate
  modified_base 7: mod_base = OTHER; note = 2'-O-methyladenosine-3'-phosphate
  modified_base 8: mod_base = OTHER; note = 2'-deoxy-2'-fluoroguanosine-3'-phosphate
  modified_base 9: mod_base = OTHER; note = 2'-O-methylcytidine-3'-phosphate
  modified_base 10: mod_base = OTHER; note = 2'-deoxy-2'-fluoroadenosine-3'-phosphate
  modified_base 11: mod_base = OTHER; note = 2'-O-methyladenosine-3'-phosphate
  modified_base 12: mod_base = OTHER; note = 2'-deoxy-2'-fluoroguanosine-3'-phosphate
  modified_base 13: mod_base = OTHER; note = 2'-deoxy-2'-fluoroadenosine-3'-phosphate
  modified_base 14: mod_base = OTHER; note = 2'-deoxy-2'-fluoroadenosine-3'-phosphate
  modified_base 15: mod_base = OTHER; note = 2'-O-methylcytidine-3'-phosphate
  modified_base 16: mod_base = OTHER; note = 2'-O-methyladenosine-3'-phosphate
  modified_base 17: mod_base = OTHER; note = 2'-O-methylcytidine-3'-phosphate
  modified_base 18: mod_base = OTHER; note = 2'-deoxy-2'-fluorouridine-3'-phosphate
  modified_base 19: mod_base = OTHER; note = 2'-O-methylguanosine-3'-phosphate
  modified_base 20: mod_base = OTHER; note = 2'-deoxy-2'-fluorouridine-3'-phosphate
  modified_base 21: mod_base = OTHER; note = 2'-O-methyluridine-3'-phosphorothioate
  modified_base 22: mod_base = OTHER; note = 2'-deoxy-2'-fluorouridine-3'-phosphorothioate
  modified_base 23: mod_base = OTHER; note = 2'-O-methyluridine
ttatagagcaagaacactgtttt

SEQ ID NO: 781 - RNA, 23 nt, synthetic construct
  source 1..23: mol_type = other RNA
  modified_base 1: mod_base = OTHER; note = 2'-O-methyluridine-3'-phosphate
  modified_base 2: mod_base = OTHER; note = 2'-deoxy-2'-fluorouridine-3'-phosphate
  modified_base 3: mod_base = OTHER; note = 2'-O-methyladenosine-3'-phosphate
  modified_base 4: mod_base = OTHER; note = 2'-deoxy-2'-fluorouridine-3'-phosphate
  modified_base 5: mod_base = OTHER; note = 2'-O-methyladenosine-3'-phosphate
  modified_base 6: mod_base = OTHER; note = 2'-deoxy-2'-fluoroguanosine-3'-phosphate
  modified_base 7: mod_base = OTHER; note = 2'-O-methyladenosine-3'-phosphate
  modified_base 8: mod_base = OTHER; note = 2'-deoxy-2'-fluoroguanosine-3'-phosphate
  modified_base 9: mod_base = OTHER; note = 2'-deoxy-2'-fluorocytidine-3'-phosphate
  modified_base 10: mod_base = OTHER; note = 2'-deoxy-2'-fluoroadenosine-3'-phosphate
  modified_base 11: mod_base = OTHER; note = 2'-O-methyladenosine-3'-phosphate
  modified_base 12: mod_base = OTHER; note = 2'-deoxy-2'-fluoroguanosine-3'-phosphate
  modified_base 13: mod_base = OTHER; note = 2'-O-methyladenosine-3'-phosphate
  modified_base 14: mod_base = OTHER; note = 2'-O-methyladenosine-3'-phosphate
  modified_base 15: mod_base = OTHER; note = 2'-O-methylcytidine-3'-phosphate
  modified_base 16: mod_base = OTHER; note = 2'-deoxy-2'-fluoroadenosine-3'-phosphate
  modified_base 17: mod_base = OTHER; note = 2'-O-methylcytidine-3'-phosphate
  modified_base 18: mod_base = OTHER; note = 2'-deoxy-2'-fluorouridine-3'-phosphate
  modified_base 19: mod_base = OTHER; note = 2'-O-methylguanosine-3'-phosphate
  modified_base 20: mod_base = OTHER; note = 2'-deoxy-2'-fluorouridine-3'-phosphate
  modified_base 21: mod_base = OTHER; note = 2'-O-methyluridine-3'-phosphorothioate
  modified_base 22: mod_base = OTHER; note = 2'-deoxy-2'-fluorouridine-3'-phosphorothioate
  modified_base 23: mod_base = OTHER; note = 2'-O-methyluridine
ttatagagcaagaacactgtttt

SEQ ID NO: 782 - RNA, 23 nt, synthetic construct
  source 1..23: mol_type = other RNA
  modified_base 1: mod_base = OTHER; note = 2'-O-methyluridine-3'-phosphate
  modified_base 2: mod_base = OTHER; note = 2'-deoxy-2'-fluorouridine-3'-phosphate
  modified_base 3: mod_base = OTHER; note = 2'-O-methyladenosine-3'-phosphate
  modified_base 4: mod_base = OTHER; note = 2'-deoxy-2'-fluorouridine-3'-phosphate
  modified_base 5: mod_base = OTHER; note = 2'-O-methyladenosine-3'-phosphate
  modified_base 6: mod_base = OTHER; note = 2'-deoxy-2'-fluoroguanosine-3'-phosphate
  modified_base 7: mod_base = OTHER; note = 2'-O-methyladenosine-3'-phosphate
  modified_base 8: mod_base = OTHER; note = 2'-deoxy-2'-fluoroguanosine-3'-phosphate
  modified_base 9: mod_base = OTHER; note = 2'-O-methylcytidine-3'-phosphate
  modified_base 10: mod_base = OTHER; note = 2'-deoxy-2'-fluoroadenosine-3'-phosphate
  modified_base 11: mod_base = OTHER; note = 2'-O-methyladenosine-3'-phosphate
  modified_base 12: mod_base = OTHER; note = 2'-deoxy-2'-fluoroguanosine-3'-phosphate
  modified_base 13: mod_base = OTHER; note = 2'-O-methyladenosine-3'-phosphate
  modified_base 14: mod_base = OTHER; note = 2'-deoxy-2'-fluoroadenosine-3'-phosphate
  modified_base 15: mod_base = OTHER; note = 2'-O-methylcytidine-3'-phosphate
  modified_base 16: mod_base = OTHER; note = 2'-deoxy-2'-fluoroadenosine-3'-phosphate
  modified_base 17: mod_base = OTHER; note = 2'-O-methylcytidine-3'-phosphate
  modified_base 18: mod_base = OTHER; note = 2'-O-methyluridine-3'-phosphate
  modified_base 19: mod_base = OTHER; note = 2'-O-methylguanosine-3'-phosphate
  modified_base 20: mod_base = OTHER; note = 2'-deoxy-2'-fluorouridine-3'-phosphate
  modified_base 21: mod_base = OTHER; note = 2'-O-methyluridine-3'-phosphorothioate
  modified_base 22: mod_base = OTHER; note = 2'-deoxy-2'-fluorouridine-3'-phosphorothioate
  modified_base 23: mod_base = OTHER; note = 2'-deoxy-2'-fluorouridine
ttatagagcaagaacactgtttt

SEQ ID NO: 783 - RNA, 23 nt, synthetic construct
  source 1..23: mol_type = other RNA
  modified_base 1: mod_base = OTHER; note = 2'-O-methyluridine-3'-phosphate
  modified_base 2: mod_base = OTHER; note = 2'-deoxy-2'-fluorouridine-3'-phosphate
  modified_base 3: mod_base = OTHER; note = 2'-O-methyladenosine-3'-phosphate
  modified_base 4: mod_base = OTHER; note = 2'-deoxy-2'-fluorouridine-3'-phosphate
  modified_base 5: mod_base = OTHER; note = 2'-O-methyladenosine-3'-phosphate
  modified_base 6: mod_base = OTHER; note = 2'-deoxy-2'-fluoroguanosine-3'-phosphate
  modified_base 7: mod_base = OTHER; note = 2'-O-methyladenosine-3'-phosphate
  modified_base 8: mod_base = OTHER; note = 2'-deoxy-2'-fluoroguanosine-3'-phosphate
  modified_base 9: mod_base = OTHER; note = 2'-O-methylcytidine-3'-phosphate
  modified_base 10: mod_base = OTHER; note = 2'-deoxy-2'-fluoroadenosine-3'-phosphate
  modified_base 11: mod_base = OTHER; note = 2'-deoxy-2'-fluoroadenosine-3'-phosphate
  modified_base 12: mod_base = OTHER; note = 2'-deoxy-2'-fluoroguanosine-3'-phosphate
  modified_base 13: mod_base = OTHER; note = 2'-O-methyladenosine-3'-phosphate
  modified_base 14: mod_base = OTHER; note = 2'-O-methyladenosine-3'-phosphate
  modified_base 15: mod_base = OTHER; note = 2'-O-methylcytidine-3'-phosphate
  modified_base 16: mod_base = OTHER; note = 2'-deoxy-2'-fluoroadenosine-3'-phosphate
  modified_base 17: mod_base = OTHER; note = 2'-O-methylcytidine-3'-phosphate
  modified_base 18: mod_base = OTHER; note = 2'-deoxy-2'-fluorouridine-3'-phosphate
  modified_base 19: mod_base = OTHER; note = 2'-O-methylguanosine-3'-phosphate
  modified_base 20: mod_base = OTHER; note = 2'-deoxy-2'-fluorouridine-3'-phosphate
  modified_base 21: mod_base = OTHER; note = 2'-O-methyluridine-3'-phosphorothioate
  modified_base 22: mod_base = OTHER; note = 2'-deoxy-2'-fluorouridine-3'-phosphorothioate
  modified_base 23: mod_base = OTHER; note = 2'-O-methyluridine
ttatagagcaagaacactgtttt

SEQ ID NO: 784 - RNA, 23 nt, synthetic construct
  source 1..23: mol_type = other RNA
  modified_base 1: mod_base = OTHER; note = 2'-O-methyluridine-3'-phosphate
  modified_base 2: mod_base = OTHER; note = 2'-deoxy-2'-fluorouridine-3'-phosphate
  modified_base 3: mod_base = OTHER; note = 2'-O-methyladenosine-3'-phosphate
  modified_base 4: mod_base = OTHER; note = 2'-deoxy-2'-fluorouridine-3'-phosphate
  modified_base 5: mod_base = OTHER; note = 2'-O-methyladenosine-3'-phosphate
  modified_base 6: mod_base = OTHER; note = 2'-deoxy-2'-fluoroguanosine-3'-phosphate
  modified_base 7: mod_base = OTHER; note = 2'-O-methyladenosine-3'-phosphate
  modified_base 8: mod_base = OTHER; note = 2'-deoxy-2'-fluoroguanosine-3'-phosphate
  modified_base 9: mod_base = OTHER; note = 2'-O-methylcytidine-3'-phosphate
  modified_base 10: mod_base = OTHER; note = 2'-O-methyladenosine-3'-phosphate
  modified_base 11: mod_base = OTHER; note = 2'-O-methyladenosine-3'-phosphate
  modified_base 12: mod_base = OTHER; note = 2'-deoxy-2'-fluoroguanosine-3'-phosphate
  modified_base 13: mod_base = OTHER; note = 2'-O-methyladenosine-3'-phosphate
  modified_base 14: mod_base = OTHER; note = 2'-deoxy-2'-fluoroadenosine-3'-phosphate
  modified_base 15: mod_base = OTHER; note = 2'-O-methylcytidine-3'-phosphate
  modified_base 16: mod_base = OTHER; note = 2'-deoxy-2'-fluoroadenosine-3'-phosphate
  modified_base 17: mod_base = OTHER; note = 2'-O-methylcytidine-3'-phosphate
  modified_base 18: mod_base = OTHER; note = 2'-deoxy-2'-fluorouridine-3'-phosphate
  modified_base 19: mod_base = OTHER; note = 2'-O-methylguanosine-3'-phosphate
  modified_base 20: mod_base = OTHER; note = 2'-deoxy-2'-fluorouridine-3'-phosphate
  modified_base 21: mod_base = OTHER; note = 2'-O-methyluridine-3'-phosphorothioate
  modified_base 22: mod_base = OTHER; note = 2'-deoxy-2'-fluorouridine-3'-phosphorothioate
  modified_base 23: mod_base = OTHER; note = 2'-deoxy-2'-fluorouridine
ttatagagcaagaacactgtttt

SEQ ID NO: 785 - RNA, 23 nt, synthetic construct
  source 1..23: mol_type = other RNA
  modified_base 1: mod_base = OTHER; note = 2'-O-methyluridine-3'-phosphate
  modified_base 2: mod_base = OTHER; note = 2'-deoxy-2'-fluorouridine-3'-phosphate
  modified_base 3: mod_base = OTHER; note = 2'-O-methyladenosine-3'-phosphate
  modified_base 4: mod_base = OTHER; note = 2'-deoxy-2'-fluorouridine-3'-phosphate
  modified_base 5: mod_base = OTHER; note = 2'-O-methyladenosine-3'-phosphate
  modified_base 6: mod_base = OTHER; note = 2'-deoxy-2'-fluoroguanosine-3'-phosphate
  modified_base 7: mod_base = OTHER; note = 2'-O-methyladenosine-3'-phosphate
  modified_base 8: mod_base = OTHER; note = 2'-deoxy-2'-fluoroguanosine-3'-phosphate
  modified_base 9: mod_base = OTHER; note = 2'-O-methylcytidine-3'-phosphate
  modified_base 10: mod_base = OTHER; note = 2'-deoxy-2'-fluoroadenosine-3'-phosphate
  modified_base 11: mod_base = OTHER; note = 2'-O-methyladenosine-3'-phosphate
  modified_base 12: mod_base = OTHER; note = 2'-deoxy-2'-fluoroguanosine-3'-phosphate
  modified_base 13: mod_base = OTHER; note = 2'-O-methyladenosine-3'-phosphate
  modified_base 14: mod_base = OTHER; note = 2'-O-methyladenosine-3'-phosphate
  modified_base 15: mod_base = OTHER; note = 2'-O-methylcytidine-3'-phosphate
  modified_base 16: mod_base = OTHER; note = 2'-deoxy-2'-fluoroadenosine-3'-phosphate
  modified_base 17: mod_base = OTHER; note = 2'-deoxy-2'-fluorocytidine-3'-phosphate
  modified_base 18: mod_base = OTHER; note = 2'-deoxy-2'-fluorouridine-3'-phosphate
  modified_base 19: mod_base = OTHER; note = 2'-O-methylguanosine-3'-phosphate
  modified_base 20: mod_base = OTHER; note = 2'-deoxy-2'-fluorouridine-3'-phosphate
  modified_base 21: mod_base = OTHER; note = 2'-O-methyluridine-3'-phosphorothioate
  modified_base 22: mod_base = OTHER; note = 2'-deoxy-2'-fluorouridine-3'-phosphorothioate
  modified_base 23: mod_base = OTHER; note = 2'-O-methyluridine
ttatagagcaagaacactgtttt

SEQ ID NO: 786 - RNA, 23 nt, synthetic construct
  source 1..23: mol_type = other RNA
  modified_base 1: mod_base = OTHER; note = 2'-O-methyluridine-3'-phosphate
  modified_base 2: mod_base = OTHER; note = 2'-deoxy-2'-fluorouridine-3'-phosphate
  modified_base 3: mod_base = OTHER; note = 2'-O-methyladenosine-3'-phosphate
  modified_base 4: mod_base = OTHER; note = 2'-deoxy-2'-fluorouridine-3'-phosphate
  modified_base 5: mod_base = OTHER; note = 2'-deoxy-2'-fluoroadenosine-3'-phosphate
  modified_base 6: mod_base = OTHER; note = 2'-deoxy-2'-fluoroguanosine-3'-phosphate
  modified_base 7: mod_base = OTHER; note = 2'-O-methyladenosine-3'-phosphate
  modified_base 8: mod_base = OTHER; note = 2'-deoxy-2'-fluoroguanosine-3'-phosphate
  modified_base 9: mod_base = OTHER; note = 2'-O-methylcytidine-3'-phosphate
  modified_base 10: mod_base = OTHER; note = 2'-O-methyladenosine-3'-phosphate
  modified_base 11: mod_base = OTHER; note = 2'-O-methyladenosine-3'-phosphate
  modified_base 12: mod_base = OTHER; note = 2'-deoxy-2'-fluoroguanosine-3'-phosphate
  modified_base 13: mod_base = OTHER; note = 2'-O-methyladenosine-3'-phosphate
  modified_base 14: mod_base = OTHER; note = 2'-deoxy-2'-fluoroadenosine-3'-phosphate
  modified_base 15: mod_base = OTHER; note = 2'-O-methylcytidine-3'-phosphate
  modified_base 16: mod_base = OTHER; note = 2'-deoxy-2'-fluoroadenosine-3'-phosphate
  modified_base 17: mod_base = OTHER; note = 2'-O-methylcytidine-3'-phosphate
  modified_base 18: mod_base = OTHER; note = 2'-deoxy-2'-fluorouridine-3'-phosphate
  modified_base 19: mod_base = OTHER; note = 2'-O-methylguanosine-3'-phosphate
  modified_base 20: mod_base = OTHER; note = 2'-deoxy-2'-fluorouridine-3'-phosphate
  modified_base 21: mod_base = OTHER; note = 2'-O-methyluridine-3'-phosphorothioate
  modified_base 22: mod_base = OTHER; note = 2'-deoxy-2'-fluorouridine-3'-phosphorothioate
  modified_base 23: mod_base = OTHER; note = 2'-O-methyluridine
ttatagagcaagaacactgtttt

SEQ ID NO: 787 - RNA, 23 nt, synthetic construct
  source 1..23: mol_type = other RNA
  modified_base 1: mod_base = OTHER; note = 2'-O-methyluridine-3'-phosphate
  modified_base 2: mod_base = OTHER; note = 2'-deoxy-2'-fluorouridine-3'-phosphate
  modified_base 3: mod_base = OTHER; note = 2'-O-methyladenosine-3'-phosphate
  modified_base 4: mod_base = OTHER; note = 2'-deoxy-2'-fluorouridine-3'-phosphate
  modified_base 5: mod_base = OTHER; note = 2'-O-methyladenosine-3'-phosphate
  modified_base 6: mod_base = OTHER; note = 2'-deoxy-2'-fluoroguanosine-3'-phosphate
  modified_base 7: mod_base = OTHER; note = 2'-O-methyladenosine-3'-phosphate
  modified_base 8: mod_base = OTHER; note = 2'-O-methylguanosine-3'-phosphate
  modified_base 9: mod_base = OTHER; note = 2'-O-methylcytidine-3'-phosphate
  modified_base 10: mod_base = OTHER; note = 2'-deoxy-2'-fluoroadenosine-3'-phosphate
  modified_base 11: mod_base = OTHER; note = 2'-O-methyladenosine-3'-phosphate
  modified_base 12: mod_base = OTHER; note = 2'-deoxy-2'-fluoroguanosine-3'-phosphate
  modified_base 13: mod_base = OTHER; note = 2'-O-methyladenosine-3'-phosphate
  modified_base 14: mod_base = OTHER; note = 2'-deoxy-2'-fluoroadenosine-3'-phosphate
  modified_base 15: mod_base = OTHER; note = 2'-O-methylcytidine-3'-phosphate
  modified_base 16: mod_base = OTHER; note = 2'-deoxy-2'-fluoroadenosine-3'-phosphate
  modified_base 17: mod_base = OTHER; note = 2'-O-methylcytidine-3'-phosphate
  modified_base 18: mod_base = OTHER; note = 2'-deoxy-2'-fluorouridine-3'-phosphate
  modified_base 19: mod_base = OTHER; note = 2'-O-methylguanosine-3'-phosphate
  modified_base 20: mod_base = OTHER; note = 2'-deoxy-2'-fluorouridine-3'-phosphate
  modified_base 21: mod_base = OTHER; note = 2'-deoxy-2'-fluorouridine-3'-phosphorothioate
  modified_base 22: mod_base = OTHER; note = 2'-deoxy-2'-fluorouridine-3'-phosphorothioate
  modified_base 23: mod_base = OTHER; note = 2'-O-methyluridine
ttatagagcaagaacactgtttt

SEQ ID NO: 788 - RNA, 23 nt, synthetic construct
  source 1..23: mol_type = other RNA
  modified_base 1: mod_base = OTHER; note = 2'-O-methyluridine-3'-phosphate
  modified_base 2: mod_base = OTHER; note = 2'-deoxy-2'-fluorouridine-3'-phosphate
  modified_base 3: mod_base = OTHER; note = 2'-O-methyladenosine-3'-phosphate
  modified_base 4: mod_base = OTHER; note = 2'-O-methyluridine-3'-phosphate
  modified_base 5: mod_base = OTHER; note = 2'-O-methyladenosine-3'-phosphate
  modified_base 6: mod_base = OTHER; note = 2'-deoxy-2'-fluoroguanosine-3'-phosphate
  modified_base 7: mod_base = OTHER; note = 2'-O-methyladenosine-3'-phosphate
  modified_base 8: mod_base = OTHER; note = 2'-deoxy-2'-fluoroguanosine-3'-phosphate
  modified_base 9: mod_base = OTHER; note = 2'-O-methylcytidine-3'-phosphate
  modified_base 10: mod_base = OTHER; note = 2'-deoxy-2'-fluoroadenosine-3'-phosphate
  modified_base 11: mod_base = OTHER; note = 2'-O-methyladenosine-3'-phosphate
  modified_base 12: mod_base = OTHER; note = 2'-deoxy-2'-fluoroguanosine-3'-phosphate
  modified_base 13: mod_base = OTHER; note = 2'-deoxy-2'-fluoroadenosine-3'-phosphate
  modified_base 14: mod_base = OTHER; note = 2'-deoxy-2'-fluoroadenosine-3'-phosphate
  modified_base 15: mod_base = OTHER; note = 2'-O-methylcytidine-3'-phosphate
  modified_base 16: mod_base = OTHER; note = 2'-deoxy-2'-fluoroadenosine-3'-phosphate
  modified_base 17: mod_base = OTHER; note = 2'-O-methylcytidine-3'-phosphate
  modified_base 18: mod_base = OTHER; note = 2'-deoxy-2'-fluorouridine-3'-phosphate
  modified_base 19: mod_base = OTHER; note = 2'-O-methylguanosine-3'-phosphate
  modified_base 20: mod_base = OTHER; note = 2'-deoxy-2'-fluorouridine-3'-phosphate
  modified_base 21: mod_base = OTHER; note = 2'-O-methyluridine-3'-phosphorothioate
  modified_base 22: mod_base = OTHER; note = 2'-deoxy-2'-fluorouridine-3'-phosphorothioate
  modified_base 23: mod_base = OTHER; note = 2'-O-methyluridine
ttatagagcaagaacactgtttt

SEQ ID NO: 789 - RNA, 23 nt, synthetic construct
  source 1..23: mol_type = other RNA
  modified_base 1: mod_base = OTHER; note = 2'-O-methyluridine-3'-phosphate
  modified_base 2: mod_base = OTHER; note = 2'-O-methyluridine-3'-phosphate
  modified_base 3: mod_base = OTHER; note = 2'-O-methyladenosine-3'-phosphate
  modified_base 4: mod_base = OTHER; note = 2'-deoxy-2'-fluorouridine-3'-phosphate
  modified_base 5: mod_base = OTHER; note = 2'-O-methyladenosine-3'-phosphate
  modified_base 6: mod_base = OTHER; note = 2'-deoxy-2'-fluoroguanosine-3'-phosphate
  modified_base 7: mod_base = OTHER; note = 2'-O-methyladenosine-3'-phosphate
  modified_base 8: mod_base = OTHER; note = 2'-deoxy-2'-fluoroguanosine-3'-phosphate
  modified_base 9: mod_base = OTHER; note = 2'-deoxy-2'-fluorocytidine-3'-phosphate
  modified_base 10: mod_base = OTHER; note = 2'-deoxy-2'-fluoroadenosine-3'-phosphate
  modified_base 11: mod_base = OTHER; note = 2'-O-methyladenosine-3'-phosphate
  modified_base 12: mod_base = OTHER; note = 2'-deoxy-2'-fluoroguanosine-3'-phosphate
  modified_base 13: mod_base = OTHER; note = 2'-O-methyladenosine-3'-phosphate
  modified_base 14: mod_base = OTHER; note = 2'-deoxy-2'-fluoroadenosine-3'-phosphate
  modified_base 15: mod_base = OTHER; note = 2'-O-methylcytidine-3'-phosphate
  modified_base 16: mod_base = OTHER; note = 2'-deoxy-2'-fluoroadenosine-3'-phosphate
  modified_base 17: mod_base = OTHER; note = 2'-O-methylcytidine-3'-phosphate
  modified_base 18: mod_base = OTHER; note = 2'-deoxy-2'-fluorouridine-3'-phosphate
  modified_base 19: mod_base = OTHER; note = 2'-O-methylguanosine-3'-phosphate
  modified_base 20: mod_base = OTHER; note = 2'-deoxy-2'-fluorouridine-3'-phosphate
  modified_base 21: mod_base = OTHER; note = 2'-O-methyluridine-3'-phosphorothioate
  modified_base 22: mod_base = OTHER; note = 2'-deoxy-2'-fluorouridine-3'-phosphorothioate
  modified_base 23: mod_base = OTHER; note = 2'-O-methyluridine
ttatagagcaagaacactgtttt

SEQ ID NO: 790 - RNA, 23 nt, synthetic construct
  source 1..23: mol_type = other RNA
  modified_base 1: mod_base = OTHER; note = 2'-O-methyluridine-3'-phosphate
  modified_base 2: mod_base = OTHER; note = 2'-deoxy-2'-fluorouridine-3'-phosphate
  modified_base 3: mod_base = OTHER; note = 2'-O-methyladenosine-3'-phosphate
  modified_base 4: mod_base = OTHER; note = 2'-deoxy-2'-fluorouridine-3'-phosphate
  modified_base 5: mod_base = OTHER; note = 2'-O-methyladenosine-3'-phosphate
  modified_base 6: mod_base = OTHER; note = 2'-deoxy-2'-fluoroguanosine-3'-phosphate
  modified_base 7: mod_base = OTHER; note = 2'-O-methyladenosine-3'-phosphate
  modified_base 8: mod_base = OTHER; note = 2'-deoxy-2'-fluoroguanosine-3'-phosphate
  modified_base 9: mod_base = OTHER; note = 2'-O-methylcytidine-3'-phosphate
  modified_base 10: mod_base = OTHER; note = 2'-deoxy-2'-fluoroadenosine-3'-phosphate
  modified_base 11: mod_base = OTHER; note = 2'-O-methyladenosine-3'-phosphate
  modified_base 12: mod_base = OTHER; note = 2'-deoxy-2'-fluoroguanosine-3'-phosphate
  modified_base 13: mod_base = OTHER; note = 2'-O-methyladenosine-3'-phosphate
  modified_base 14: mod_base = OTHER; note = 2'-deoxy-2'-fluoroadenosine-3'-phosphate
  modified_base 15: mod_base = OTHER; note = 2'-O-methylcytidine-3'-phosphate
  modified_base 16: mod_base = OTHER; note = 2'-deoxy-2'-fluoroadenosine-3'-phosphate
  modified_base 17: mod_base = OTHER; note = 2'-O-methylcytidine-3'-phosphate
  modified_base 18: mod_base = OTHER; note = 2'-deoxy-2'-fluorouridine-3'-phosphate
  modified_base 19: mod_base = OTHER; note = 2'-O-methylguanosine-3'-phosphate
  modified_base 20: mod_base = OTHER; note = 2'-deoxy-2'-fluorouridine-3'-phosphate
  modified_base 21: mod_base = OTHER; note = 2'-O-methyluridine-3'-phosphorothioate
  modified_base 22: mod_base = OTHER; note = 2'-deoxy-2'-fluorouridine-3'-phosphorothioate
  modified_base 23: mod_base = OTHER; note = 2'-O-methyluridine
ttatagagcaagaacactgtttt

SEQ ID NO: 791 - RNA, 23 nt, synthetic construct
  source 1..23: mol_type = other RNA
  modified_base 1: mod_base = OTHER; note = 2'-O-methyluridine-3'-phosphate
  modified_base 2: mod_base = OTHER; note = 2'-deoxy-2'-fluorouridine-3'-phosphate
  modified_base 3: mod_base = OTHER; note = 2'-deoxy-2'-fluoroadenosine-3'-phosphate
  modified_base 4: mod_base = OTHER; note = 2'-deoxy-2'-fluorouridine-3'-phosphate
  modified_base 5: mod_base = OTHER; note = 2'-O-methyladenosine-3'-phosphate
  modified_base 6: mod_base = OTHER; note = 2'-deoxy-2'-fluoroguanosine-3'-phosphate
  modified_base 7: mod_base = OTHER; note = 2'-O-methyladenosine-3'-phosphate
  modified_base 8: mod_base = OTHER; note = 2'-O-methylguanosine-3'-phosphate
  modified_base 9: mod_base = OTHER; note = 2'-O-methylcytidine-3'-phosphate
  modified_base 10: mod_base = OTHER; note = 2'-deoxy-2'-fluoroadenosine-3'-phosphate
  modified_base 11: mod_base = OTHER; note = 2'-O-methyladenosine-3'-phosphate
  modified_base 12: mod_base = OTHER; note = 2'-deoxy-2'-fluoroguanosine-3'-phosphate
  modified_base 13: mod_base = OTHER; note = 2'-O-methyladenosine-3'-phosphate
  modified_base 14: mod_base = OTHER; note = 2'-deoxy-2'-fluoroadenosine-3'-phosphate
  modified_base 15: mod_base = OTHER; note = 2'-O-methylcytidine-3'-phosphate
  modified_base 16: mod_base = OTHER; note = 2'-deoxy-2'-fluoroadenosine-3'-phosphate
  modified_base 17: mod_base = OTHER; note = 2'-O-methylcytidine-3'-phosphate
  modified_base 18: mod_base = OTHER; note = 2'-deoxy-2'-fluorouridine-3'-phosphate
  modified_base 19: mod_base = OTHER; note = 2'-O-methylguanosine-3'-phosphate
  modified_base 20: mod_base = OTHER; note = 2'-deoxy-2'-fluorouridine-3'-phosphate
  modified_base 21: mod_base = OTHER; note = 2'-O-methyluridine-3'-phosphorothioate
  modified_base 22: mod_base = OTHER; note = 2'-deoxy-2'-fluorouridine-3'-phosphorothioate
  modified_base 23: mod_base = OTHER; note = 2'-O-methyluridine
ttatagagcaagaacactgtttt

SEQ ID NO: 792 - RNA, 23 nt, synthetic construct
  source 1..23: mol_type = other RNA
  modified_base 1: mod_base = OTHER; note = 2'-O-methyluridine-3'-phosphate
  modified_base 2: mod_base = OTHER; note = 2'-deoxy-2'-fluorouridine-3'-phosphate
  modified_base 3: mod_base = OTHER; note = 2'-O-methyladenosine-3'-phosphate
  modified_base 4: mod_base = OTHER; note = 2'-deoxy-2'-fluorouridine-3'-phosphate
  modified_base 5: mod_base = OTHER; note = 2'-O-methyladenosine-3'-phosphate
  modified_base 6: mod_base = OTHER; note = 2'-deoxy-2'-fluoroguanosine-3'-phosphate
  modified_base 7: mod_base = OTHER; note = 2'-O-methyladenosine-3'-phosphate
  modified_base 8: mod_base = OTHER; note = 2'-O-methylguanosine-3'-phosphate
  modified_base 9: mod_base = OTHER; note = 2'-O-methylcytidine-3'-phosphate
  modified_base 10: mod_base = OTHER; note = 2'-deoxy-2'-fluoroadenosine-3'-phosphate
  modified_base 11: mod_base = OTHER; note = 2'-O-methyladenosine-3'-phosphate
  modified_base 12: mod_base = OTHER; note = 2'-deoxy-2'-fluoroguanosine-3'-phosphate
  modified_base 13: mod_base = OTHER; note = 2'-O-methyladenosine-3'-phosphate
  modified_base 14: mod_base = OTHER; note = 2'-deoxy-2'-fluoroadenosine-3'-phosphate
  modified_base 15: mod_base = OTHER; note = 2'-O-methylcytidine-3'-phosphate
  modified_base 16: mod_base = OTHER; note = 2'-deoxy-2'-fluoroadenosine-3'-phosphate
  modified_base 17: mod_base = OTHER; note = 2'-O-methylcytidine-3'-phosphate
  modified_base 18: mod_base = OTHER; note = 2'-deoxy-2'-fluorouridine-3'-phosphate
  modified_base 19: mod_base = OTHER; note = 2'-O-methylguanosine-3'-phosphate
  modified_base 20: mod_base = OTHER; note = 2'-deoxy-2'-fluorouridine-3'-phosphate
  modified_base 21: mod_base = OTHER; note = 2'-O-methyluridine-3'-phosphorothioate
  modified_base 22: mod_base = OTHER; note = 2'-deoxy-2'-fluorouridine-3'-phosphorothioate
  modified_base 23: mod_base = OTHER; note = 2'-deoxy-2'-fluorouridine
ttatagagcaagaacactgtttt

SEQ ID NO: 793 - RNA, 23 nt, synthetic construct
  source 1..23: mol_type = other RNA
  modified_base 1: mod_base = OTHER; note = 2'-O-methyluridine-3'-phosphate
  modified_base 2: mod_base = OTHER; note = 2'-deoxy-2'-fluorouridine-3'-phosphate
  modified_base 3: mod_base = OTHER; note = 2'-O-methyladenosine-3'-phosphate
  modified_base 4: mod_base = OTHER; note = 2'-O-methyluridine-3'-phosphate
  modified_base 5: mod_base = OTHER; note = 2'-O-methyladenosine-3'-phosphate
  modified_base 6: mod_base = OTHER; note = 2'-deoxy-2'-fluoroguanosine-3'-phosphate
  modified_base 7: mod_base = OTHER; note = 2'-O-methyladenosine-3'-phosphate
  modified_base 8: mod_base = OTHER; note = 2'-deoxy-2'-fluoroguanosine-3'-phosphate
  modified_base 9: mod_base = OTHER; note = 2'-O-methylcytidine-3'-phosphate
  modified_base 10: mod_base = OTHER; note = 2'-deoxy-2'-fluoroadenosine-3'-phosphate
  modified_base 11: mod_base = OTHER; note = 2'-O-methyladenosine-3'-phosphate
  modified_base 12: mod_base = OTHER; note = 2'-deoxy-2'-fluoroguanosine-3'-phosphate
  modified_base 13: mod_base = OTHER; note = 2'-O-methyladenosine-3'-phosphate
  modified_base 14: mod_base = OTHER; note = 2'-deoxy-2'-fluoroadenosine-3'-phosphate
  modified_base 15: mod_base = OTHER; note = 2'-deoxy-2'-fluorocytidine-3'-phosphate
  modified_base 16: mod_base = OTHER; note = 2'-deoxy-2'-fluoroadenosine-3'-phosphate
  modified_base 17: mod_base = OTHER; note = 2'-O-methylcytidine-3'-phosphate
  modified_base 18: mod_base = OTHER; note = 2'-deoxy-2'-fluorouridine-3'-phosphate
  modified_base 19: mod_base = OTHER; note = 2'-O-methylguanosine-3'-phosphate
  modified_base 20: mod_base = OTHER; note = 2'-deoxy-2'-fluorouridine-3'-phosphate
  modified_base 21: mod_base = OTHER; note = 2'-O-methyluridine-3'-phosphorothioate
  modified_base 22: mod_base = OTHER; note = 2'-deoxy-2'-fluorouridine-3'-phosphorothioate
  modified_base 23: mod_base = OTHER; note = 2'-O-methyluridine
ttatagagcaagaacactgtttt

SEQ ID NO: 794 - RNA, 23 nt, synthetic construct
  source 1..23: mol_type = other RNA
  modified_base 1: mod_base = OTHER; note = 2'-O-methyluridine-3'-phosphate
  modified_base 2: mod_base = OTHER; note = 2'-O-methyluridine-3'-phosphate
  modified_base 3: mod_base = OTHER; note = 2'-O-methyladenosine-3'-phosphate
  modified_base 4: mod_base = OTHER; note = 2'-deoxy-2'-fluorouridine-3'-phosphate
  modified_base 5: mod_base = OTHER; note = 2'-O-methyladenosine-3'-phosphate
  modified_base 6: mod_base = OTHER; note = 2'-deoxy-2'-fluoroguanosine-3'-phosphate
  modified_base 7: mod_base = OTHER; note = 2'-O-methyladenosine-3'-phosphate
  modified_base 8: mod_base = OTHER; note = 2'-deoxy-2'-fluoroguanosine-3'-phosphate
  modified_base 9: mod_base = OTHER; note = 2'-O-methylcytidine-3'-phosphate
  modified_base 10: mod_base = OTHER; note = 2'-deoxy-2'-fluoroadenosine-3'-phosphate
  modified_base 11: mod_base = OTHER; note = 2'-deoxy-2'-fluoroadenosine-3'-phosphate
  modified_base 12: mod_base = OTHER; note = 2'-deoxy-2'-fluoroguanosine-3'-phosphate
  modified_base 13: mod_base = OTHER; note = 2'-O-methyladenosine-3'-phosphate
  modified_base 14: mod_base = OTHER; note = 2'-deoxy-2'-fluoroadenosine-3'-phosphate
  modified_base 15: mod_base = OTHER; note = 2'-O-methylcytidine-3'-phosphate
  modified_base 16: mod_base = OTHER; note = 2'-deoxy-2'-fluoroadenosine-3'-phosphate
  modified_base 17: mod_base = OTHER; note = 2'-O-methylcytidine-3'-phosphate
  modified_base 18: mod_base = OTHER; note = 2'-deoxy-2'-fluorouridine-3'-phosphate
  modified_base 19: mod_base = OTHER; note = 2'-O-methylguanosine-3'-phosphate
  modified_base 20: mod_base = OTHER; note = 2'-deoxy-2'-fluorouridine-3'-phosphate
  modified_base 21: mod_base = OTHER; note = 2'-O-methyluridine-3'-phosphorothioate
  modified_base 22: mod_base = OTHER; note = 2'-deoxy-2'-fluorouridine-3'-phosphorothioate
  modified_base 23: mod_base = OTHER; note = 2'-O-methyluridine
ttatagagcaagaacactgtttt

SEQ ID NO: 795 - RNA, 23 nt, synthetic construct
  source 1..23: mol_type = other RNA
  modified_base 1: mod_base = OTHER; note = 2'-O-methyluridine-3'-phosphate
  modified_base 2: mod_base = OTHER; note = 2'-deoxy-2'-fluorouridine-3'-phosphate
  modified_base 3: mod_base = OTHER; note = 2'-O-methyladenosine-3'-phosphate
  modified_base 4: mod_base = OTHER; note = 2'-deoxy-2'-fluorouridine-3'-phosphate
  modified_base 5: mod_base = OTHER; note = 2'-deoxy-2'-fluoroadenosine-3'-phosphate
  modified_base 6: mod_base = OTHER; note = 2'-deoxy-2'-fluoroguanosine-3'-phosphate
  modified_base 7: mod_base = OTHER; note = 2'-O-methyladenosine-3'-phosphate
  modified_base 8: mod_base = OTHER; note = 2'-O-methylguanosine-3'-phosphate
  modified_base 9: mod_base = OTHER; note = 2'-O-methylcytidine-3'-phosphate
  modified_base 10: mod_base = OTHER; note = 2'-deoxy-2'-fluoroadenosine-3'-phosphate
  modified_base 11: mod_base = OTHER; note = 2'-O-methyladenosine-3'-phosphate
  modified_base 12: mod_base = OTHER; note = 2'-deoxy-2'-fluoroguanosine-3'-phosphate
  modified_base 13: mod_base = OTHER; note = 2'-O-methyladenosine-3'-phosphate
  modified_base 14: mod_base = OTHER; note = 2'-deoxy-2'-fluoroadenosine-3'-phosphate
  modified_base 15: mod_base = OTHER; note = 2'-O-methylcytidine-3'-phosphate
  modified_base 16: mod_base = OTHER; note = 2'-deoxy-2'-fluoroadenosine-3'-phosphate
  modified_base 17: mod_base = OTHER; note = 2'-O-methylcytidine-3'-phosphate
  modified_base 18: mod_base = OTHER; note = 2'-deoxy-2'-fluorouridine-3'-phosphate
  modified_base 19: mod_base = OTHER; note = 2'-O-methylguanosine-3'-phosphate
  modified_base 20: mod_base = OTHER; note = 2'-deoxy-2'-fluorouridine-3'-phosphate
  modified_base 21: mod_base = OTHER; note = 2'-O-methyluridine-3'-phosphorothioate
  modified_base 22: mod_base = OTHER; note = 2'-deoxy-2'-fluorouridine-3'-phosphorothioate
  modified_base 23: mod_base = OTHER; note = 2'-O-methyluridine
ttatagagcaagaacactgtttt

SEQ ID NO: 796 - RNA, 23 nt, synthetic construct
  source 1..23: mol_type = other RNA
  modified_base 1: mod_base = OTHER; note = 2'-O-methyluridine-3'-phosphate
  modified_base 2: mod_base = OTHER; note = 2'-deoxy-2'-fluorouridine-3'-phosphate
  modified_base 3: mod_base = OTHER; note = 2'-O-methyladenosine-3'-phosphate
  modified_base 4: mod_base = OTHER; note = 2'-deoxy-2'-fluorouridine-3'-phosphate
  modified_base 5: mod_base = OTHER; note = 2'-deoxy-2'-fluoroadenosine-3'-phosphate
  modified_base 6: mod_base = OTHER; note = 2'-deoxy-2'-fluoroguanosine-3'-phosphate
  modified_base 7: mod_base = OTHER; note = 2'-O-methyladenosine-3'-phosphate
  modified_base 8: mod_base = OTHER; note = 2'-O-methylguanosine-3'-phosphate
  modified_base 9: mod_base = OTHER; note = 2'-O-methylcytidine-3'-phosphate
  modified_base 10: mod_base = OTHER; note = 2'-deoxy-2'-fluoroadenosine-3'-phosphate
  modified_base 11: mod_base = OTHER; note = 2'-O-methyladenosine-3'-phosphate
  modified_base 12: mod_base = OTHER; note = 2'-deoxy-2'-fluoroguanosine-3'-phosphate
  modified_base 13: mod_base = OTHER; note = 2'-O-methyladenosine-3'-phosphate
  modified_base 14: mod_base = OTHER; note = 2'-deoxy-2'-fluoroadenosine-3'-phosphate
  modified_base 15: mod_base = OTHER; note = 2'-O-methylcytidine-3'-phosphate
  modified_base 16: mod_base = OTHER; note = 2'-deoxy-2'-fluoroadenosine-3'-phosphate
  modified_base 17: mod_base = OTHER; note = 2'-O-methylcytidine-3'-phosphate
  modified_base 18: mod_base = OTHER; note = 2'-deoxy-2'-fluorouridine-3'-phosphate
  modified_base 19: mod_base = OTHER; note = 2'-O-methylguanosine-3'-phosphate
  modified_base 20: mod_base = OTHER; note = 2'-deoxy-2'-fluorouridine-3'-phosphate
  modified_base 21: mod_base = OTHER; note = 2'-O-methyluridine-3'-phosphorothioate
  modified_base 22: mod_base = OTHER; note = 2'-deoxy-2'-fluorouridine-3'-phosphorothioate
  modified_base 23: mod_base = OTHER; note = 2'-O-methyluridine
ttatagagcaagaacactgtttt

SEQ ID NO: 797 - RNA, 23 nt, synthetic construct
  source 1..23: mol_type = other RNA
  modified_base 1: mod_base = OTHER; note = 2'-O-methyluridine-3'-phosphate
  modified_base 2: mod_base = OTHER; note = 2'-deoxy-2'-fluorouridine-3'-phosphate
  modified_base 3: mod_base = OTHER; note = 2'-O-methyladenosine-3'-phosphate
  modified_base 4: mod_base = OTHER; note = 2'-O-methyluridine-3'-phosphate
  modified_base 5: mod_base = OTHER; note = 2'-O-methyladenosine-3'-phosphate
  modified_base 6: mod_base = OTHER; note = 2'-deoxy-2'-fluoroguanosine-3'-phosphate
  modified_base 7: mod_base = OTHER; note = 2'-O-methyladenosine-3'-phosphate
  modified_base 8: mod_base = OTHER; note = 2'-deoxy-2'-fluoroguanosine-3'-phosphate
  modified_base 9: mod_base = OTHER; note = 2'-O-methylcytidine-3'-phosphate
  modified_base 10: mod_base = OTHER; note = 2'-deoxy-2'-fluoroadenosine-3'-phosphate
  modified_base 11: mod_base = OTHER; note = 2'-O-methyladenosine-3'-phosphate
  modified_base 12: mod_base = OTHER; note = 2'-deoxy-2'-fluoroguanosine-3'-phosphate
  modified_base 13: mod_base = OTHER; note = 2'-O-methyladenosine-3'-phosphate
  modified_base 14: mod_base = OTHER; note = 2'-deoxy-2'-fluoroadenosine-3'-phosphate
  modified_base 15: mod_base = OTHER; note = 2'-O-methylcytidine-3'-phosphate
  modified_base 16: mod_base = OTHER; note = 2'-deoxy-2'-fluoroadenosine-3'-phosphate
  modified_base 17: mod_base = OTHER; note = 2'-deoxy-2'-fluorocytidine-3'-phosphate
  modified_base 18: mod_base = OTHER; note = 2'-deoxy-2'-fluorouridine-3'-phosphate
  modified_base 19: mod_base = OTHER; note = 2'-O-methylguanosine-3'-phosphate
  modified_base 20: mod_base = OTHER; note = 2'-deoxy-2'-fluorouridine-3'-phosphate
  modified_base 21: mod_base = OTHER; note = 2'-O-methyluridine-3'-phosphorothioate
  modified_base 22: mod_base = OTHER; note = 2'-deoxy-2'-fluorouridine-3'-phosphorothioate
  modified_base 23: mod_base = OTHER; note = 2'-O-methyluridine
ttatagagcaagaacactgtttt

SEQ ID NO: 798 - RNA, 23 nt, synthetic construct
  source 1..23: mol_type = other RNA
  modified_base 1: mod_base = OTHER; note = 2'-O-methyluridine-3'-phosphate
  modified_base 2: mod_base = OTHER; note = 2'-O-methyluridine-3'-phosphate
  modified_base 3: mod_base = OTHER; note = 2'-O-methyladenosine-3'-phosphate
  modified_base 4: mod_base = OTHER; note = 2'-deoxy-2'-fluorouridine-3'-phosphate
  modified_base 5: mod_base = OTHER; note = 2'-O-methyladenosine-3'-phosphate
  modified_base 6: mod_base = OTHER; note = 2'-deoxy-2'-fluoroguanosine-3'-phosphate
  modified_base 7: mod_base = OTHER; note = 2'-O-methyladenosine-3'-phosphate
  modified_base 8: mod_base = OTHER; note = 2'-deoxy-2'-fluoroguanosine-3'-phosphate
  modified_base 9: mod_base = OTHER; note = 2'-O-methylcytidine-3'-phosphate
  modified_base 10: mod_base = OTHER; note = 2'-deoxy-2'-fluoroadenosine-3'-phosphate
  modified_base 11: mod_base = OTHER; note = 2'-O-methyladenosine-3'-phosphate
  modified_base 12: mod_base = OTHER; note = 2'-deoxy-2'-fluoroguanosine-3'-phosphate
  modified_base 13: mod_base = OTHER; note = 2'-deoxy-2'-fluoroadenosine-3'-phosphate
  modified_base 14: mod_base = OTHER; note = 2'-deoxy-2'-fluoroadenosine-3'-phosphate
  modified_base 15: mod_base = OTHER; note = 2'-O-methylcytidine-3'-phosphate
  modified_base 16: mod_base = OTHER; note = 2'-deoxy-2'-fluoroadenosine-3'-phosphate
  modified_base 17: mod_base = OTHER; note = 2'-O-methylcytidine-3'-phosphate
  modified_base 18: mod_base = OTHER; note = 2'-deoxy-2'-fluorouridine-3'-phosphate
  modified_base 19: mod_base = OTHER; note = 2'-O-methylguanosine-3'-phosphate
  modified_base 20: mod_base = OTHER; note = 2'-deoxy-2'-fluorouridine-3'-phosphate
  modified_base 21: mod_base = OTHER; note = 2'-O-methyluridine-3'-phosphorothioate
  modified_base 22: mod_base = OTHER; note = 2'-deoxy-2'-fluorouridine-3'-phosphorothioate
  modified_base 23: mod_base = OTHER; note = 2'-O-methyluridine
ttatagagcaagaacactgtttt

SEQ ID NO: 799 - RNA, 23 nt, synthetic construct
  source 1..23: mol_type = other RNA
  modified_base 1: mod_base = OTHER; note = 2'-O-methyluridine-3'-phosphate
  modified_base 2: mod_base = OTHER; note = 2'-deoxy-2'-fluorouridine-3'-phosphate
  modified_base 3: mod_base = OTHER; note = 2'-O-methyladenosine-3'-phosphate
  modified_base 4: mod_base = OTHER; note = 2'-deoxy-2'-fluorouridine-3'-phosphate
  modified_base 5: mod_base = OTHER; note = 2'-O-methyladenosine-3'-phosphate
  modified_base 6: mod_base = OTHER; note = 2'-deoxy-2'-fluoroguanosine-3'-phosphate
  modified_base 7: mod_base = OTHER; note = 2'-O-methyladenosine-3'-phosphate
  modified_base 8: mod_base = OTHER; note = 2'-deoxy-2'-fluoroguanosine-3'-phosphate
  modified_base 9: mod_base = OTHER; note = 2'-O-methylcytidine-3'-phosphate
  modified_base 10: mod_base = OTHER; note = 2'-deoxy-2'-fluoroadenosine-3'-phosphate
  modified_base 11: mod_base = OTHER; note = 2'-O-methyladenosine-3'-phosphate
  modified_base 12: mod_base = OTHER; note = 2'-deoxy-2'-fluoroguanosine-3'-phosphate
  modified_base 13: mod_base = OTHER; note = 2'-O-methyladenosine-3'-phosphate
  modified_base 14: mod_base = OTHER; note = 2'-deoxy-2'-fluoroadenosine-3'-phosphate
  modified_base 15: mod_base = OTHER; note = 2'-deoxy-2'-fluorocytidine-3'-phosphate
  modified_base 16: mod_base = OTHER; note = 2'-deoxy-2'-fluoroadenosine-3'-phosphate
  modified_base 17: mod_base = OTHER; note = 2'-O-methylcytidine-3'-phosphate
  modified_base 18: mod_base = OTHER; note = 2'-deoxy-2'-fluorouridine-3'-phosphate
  modified_base 19: mod_base = OTHER; note = 2'-deoxy-2'-fluoroguanosine-3'-phosphate
  modified_base 20: mod_base = OTHER; note = 2'-deoxy-2'-fluorouridine-3'-phosphate
  modified_base 21: mod_base = OTHER; note = 2'-O-methyluridine-3'-phosphorothioate
  modified_base 22: mod_base = OTHER; note = 2'-deoxy-2'-fluorouridine-3'-phosphorothioate
  modified_base 23: mod_base = OTHER; note = 2'-O-methyluridine
ttatagagcaagaacactgtttt

SEQ ID NO: 800 - RNA, 23 nt, synthetic construct
  source 1..23: mol_type = other RNA
  modified_base 1: mod_base = OTHER; note = 2'-O-methyluridine-3'-phosphate
  modified_base 2: mod_base = OTHER; note = 2'-deoxy-2'-fluorouridine-3'-phosphate
  modified_base 3: mod_base = OTHER; note = 2'-O-methyladenosine-3'-phosphate
  modified_base 4: mod_base = OTHER; note = 2'-deoxy-2'-fluorouridine-3'-phosphate
  modified_base 5: mod_base = OTHER; note = 2'-O-methyladenosine-3'-phosphate
  modified_base 6: mod_base = OTHER; note = 2'-deoxy-2'-fluoroguanosine-3'-phosphate
  modified_base 7: mod_base = OTHER; note = 2'-O-methyladenosine-3'-phosphate
  modified_base 8: mod_base = OTHER; note = 2'-O-methylguanosine-3'-phosphate
  modified_base 9: mod_base = OTHER; note = 2'-O-methylcytidine-3'-phosphate
  modified_base 10: mod_base = OTHER; note = 2'-deoxy-2'-fluoroadenosine-3'-phosphate
  modified_base 11: mod_base = OTHER; note = 2'-deoxy-2'-fluoroadenosine-3'-phosphate
  modified_base 12: mod_base = OTHER; note = 2'-deoxy-2'-fluoroguanosine-3'-phosphate
  modified_base 13: mod_base = OTHER; note = 2'-O-methyladenosine-3'-phosphate
  modified_base 14: mod_base = OTHER; note = 2'-deoxy-2'-fluoroadenosine-3'-phosphate
  modified_base 15: mod_base = OTHER; note = 2'-O-methylcytidine-3'-phosphate
  modified_base 16: mod_base = OTHER; note = 2'-deoxy-2'-fluoroadenosine-3'-phosphate
  modified_base 17: mod_base = OTHER; note = 2'-O-methylcytidine-3'-phosphate
  modified_base 18: mod_base = OTHER; note = 2'-deoxy-2'-fluorouridine-3'-phosphate
  modified_base 19: mod_base = OTHER; note = 2'-O-methylguanosine-3'-phosphate
  modified_base 20: mod_base = OTHER; note = 2'-deoxy-2'-fluorouridine-3'-phosphate
  modified_base 21: mod_base = OTHER; note = 2'-O-methyluridine-3'-phosphorothioate
  modified_base 22: mod_base = OTHER; note = 2'-deoxy-2'-fluorouridine-3'-phosphorothioate
  modified_base 23: mod_base = OTHER; note = 2'-O-methyluridine
ttatagagcaagaacactgtttt

SEQ ID NO: 801 - RNA, 23 nt, synthetic construct
  source 1..23: mol_type = other RNA
  modified_base 1: mod_base = OTHER; note = 2'-O-methyluridine-3'-phosphate
  modified_base 2: mod_base = OTHER; note = 2'-deoxy-2'-fluorouridine-3'-phosphate
  modified_base 3: mod_base = OTHER; note = 2'-O-methyladenosine-3'-phosphate
  modified_base 4: mod_base = OTHER; note = 2'-deoxy-2'-fluorouridine-3'-phosphate
  modified_base 5: mod_base = OTHER; note = 2'-O-methyladenosine-3'-phosphate
  modified_base 6: mod_base = OTHER; note = 2'-deoxy-2'-fluoroguanosine-3'-phosphate
  modified_base 7: mod_base = OTHER; note = 2'-O-methyladenosine-3'-phosphate
  modified_base 8: mod_base = OTHER; note = 2'-O-methylguanosine-3'-phosphate
  modified_base 9: mod_base = OTHER; note = 2'-O-methylcytidine-3'-phosphate
  modified_base 10: mod_base = OTHER; note = 2'-deoxy-2'-fluoroadenosine-3'-phosphate
  modified_base 11: mod_base = OTHER; note = 2'-deoxy-2'-fluoroadenosine-3'-phosphate
  modified_base 12: mod_base = OTHER; note = 2'-deoxy-2'-fluoroguanosine-3'-phosphate
  modified_base 13: mod_base = OTHER; note = 2'-O-methyladenosine-3'-phosphate
  modified_base 14: mod_base = OTHER; note = 2'-deoxy-2'-fluoroadenosine-3'-phosphate
  modified_base 15: mod_base = OTHER; note = 2'-O-methylcytidine-3'-phosphate
  modified_base 16: mod_base = OTHER; note = 2'-deoxy-2'-fluoroadenosine-3'-phosphate
  modified_base 17: mod_base = OTHER; note = 2'-O-methylcytidine-3'-phosphate
  modified_base 18: mod_base = OTHER; note = 2'-deoxy-2'-fluorouridine-3'-phosphate
  modified_base 19: mod_base = OTHER; note = 2'-O-methylguanosine-3'-phosphate
  modified_base 20: mod_base = OTHER; note = 2'-deoxy-2'-fluorouridine-3'-phosphate
  modified_base 21: mod_base = OTHER; note = 2'-O-methyluridine-3'-phosphorothioate
  modified_base 22: mod_base = OTHER; note = 2'-deoxy-2'-fluorouridine-3'-phosphorothioate
  modified_base 23: mod_base = OTHER; note = 2'-O-methyluridine
ttatagagcaagaacactgtttt

SEQ ID NO: 802 - RNA, 23 nt, synthetic construct
  source 1..23: mol_type = other RNA
  modified_base 1: mod_base = OTHER; note = 2'-O-methyluridine-3'-phosphate
  modified_base 2: mod_base = OTHER; note = 2'-deoxy-2'-fluorouridine-3'-phosphate
  modified_base 3: mod_base = OTHER; note = 2'-deoxy-2'-fluoroadenosine-3'-phosphate
  modified_base 4: mod_base = OTHER; note = 2'-deoxy-2'-fluorouridine-3'-phosphate
  modified_base 5: mod_base = OTHER; note = 2'-O-methyladenosine-3'-phosphate
  modified_base 6: mod_base = OTHER; note = 2'-O-methylguanosine-3'-phosphate
  modified_base 7: mod_base = OTHER; note = 2'-O-methyladenosine-3'-phosphate
  modified_base 8: mod_base = OTHER; note = 2'-deoxy-2'-fluoroguanosine-3'-phosphate
  modified_base 9: mod_base = OTHER; note = 2'-O-methylcytidine-3'-phosphate
  modified_base 10: mod_base = OTHER; note = 2'-deoxy-2'-fluoroadenosine-3'-phosphate
  modified_base 11: mod_base = OTHER; note = 2'-O-methyladenosine-3'-phosphate
  modified_base 12: mod_base = OTHER; note = 2'-deoxy-2'-fluoroguanosine-3'-phosphate
  modified_base 13: mod_base = OTHER; note = 2'-O-methyladenosine-3'-phosphate
  modified_base 14: mod_base = OTHER; note = 2'-deoxy-2'-fluoroadenosine-3'-phosphate
  modified_base 15: mod_base = OTHER; note = 2'-O-methylcytidine-3'-phosphate
  modified_base 16: mod_base = OTHER; note = 2'-deoxy-2'-fluoroadenosine-3'-phosphate
  modified_base 17: mod_base = OTHER; note = 2'-O-methylcytidine-3'-phosphate
  modified_base 18: mod_base = OTHER; note = 2'-deoxy-2'-fluorouridine-3'-phosphate
  modified_base 19: mod_base = OTHER; note = 2'-O-methylguanosine-3'-phosphate
  modified_base 20: mod_base = OTHER; note = 2'-deoxy-2'-fluorouridine-3'-phosphate
  modified_base 21: mod_base = OTHER; note = 2'-O-methyluridine-3'-phosphorothioate
  modified_base 22: mod_base = OTHER; note = 2'-deoxy-2'-fluorouridine-3'-phosphorothioate
  modified_base 23: mod_base = OTHER; note = 2'-O-methyluridine
ttatagagcaagaacactgtttt

SEQ ID NO: 803 - RNA, 23 nt, synthetic construct
  source 1..23: mol_type = other RNA
  modified_base 1: mod_base = OTHER; note = 2'-O-methyluridine-3'-phosphate
  modified_base 2: mod_base = OTHER; note = 2'-O-methyluridine-3'-phosphate
  modified_base 3: mod_base = OTHER; note = 2'-O-methyladenosine-3'-phosphate
  modified_base 4: mod_base = OTHER; note = 2'-deoxy-2'-fluorouridine-3'-phosphate
  modified_base 5: mod_base = OTHER; note = 2'-O-methyladenosine-3'-phosphate
  modified_base 6: mod_base = OTHER; note = 2'-deoxy-2'-fluoroguanosine-3'-phosphate
  modified_base 7: mod_base = OTHER; note = 2'-O-methyladenosine-3'-phosphate
  modified_base 8: mod_base = OTHER; note = 2'-deoxy-2'-fluoroguanosine-3'-phosphate
  modified_base 9: mod_base = OTHER; note = 2'-O-methylcytidine-3'-phosphate
  modified_base 10: mod_base = OTHER; note = 2'-deoxy-2'-fluoroadenosine-3'-phosphate
  modified_base 11: mod_base = OTHER; note = 2'-O-methyladenosine-3'-phosphate
  modified_base 12: mod_base = OTHER; note = 2'-deoxy-2'-fluoroguanosine-3'-phosphate
  modified_base 13: mod_base = OTHER; note = 2'-O-methyladenosine-3'-phosphate
  modified_base 14: mod_base = OTHER; note = 2'-deoxy-2'-fluoroadenosine-3'-phosphate
  modified_base 15: mod_base = OTHER; note = 2'-deoxy-2'-fluorocytidine-3'-phosphate
  modified_base 16: mod_base = OTHER; note = 2'-deoxy-2'-fluoroadenosine-3'-phosphate
  modified_base 17: mod_base = OTHER; note = 2'-O-methylcytidine-3'-phosphate
  modified_base 18: mod_base = OTHER; note = 2'-deoxy-2'-fluorouridine-3'-phosphate
  modified_base 19: mod_base = OTHER; note = 2'-O-methylguanosine-3'-phosphate
  modified_base 20: mod_base = OTHER; note = 2'-deoxy-2'-fluorouridine-3'-phosphate
  modified_base 21: mod_base = OTHER; note = 2'-O-methyluridine-3'-phosphorothioate
  modified_base 22: mod_base = OTHER; note = 2'-deoxy-2'-fluorouridine-3'-phosphorothioate
  modified_base 23: mod_base = OTHER; note = 2'-O-methyluridine
ttatagagcaagaacactgtttt

SEQ ID NO: 804 - RNA, 23 nt, synthetic construct
  source 1..23: mol_type = other RNA
  modified_base 1: mod_base = OTHER; note = 2'-O-methyluridine-3'-phosphate
  modified_base 2: mod_base = OTHER; note = 2'-deoxy-2'-fluorouridine-3'-phosphate
  modified_base 3: mod_base = OTHER; note = 2'-O-methyladenosine-3'-phosphate
  modified_base 4: mod_base = OTHER; note = 2'-deoxy-2'-fluorouridine-3'-phosphate
  modified_base 5: mod_base = OTHER; note = 2'-O-methyladenosine-3'-phosphate
  modified_base 6: mod_base = OTHER; note = 2'-deoxy-2'-fluoroguanosine-3'-phosphate
  modified_base 7: mod_base = OTHER; note = 2'-O-methyladenosine-3'-phosphate
  modified_base 8: mod_base = OTHER; note = 2'-O-methylguanosine-3'-phosphate
  modified_base 9: mod_base = OTHER; note = 2'-O-methylcytidine-3'-phosphate
  modified_base 10: mod_base = OTHER; note = 2'-deoxy-2'-fluoroadenosine-3'-phosphate
  modified_base 11: mod_base = OTHER; note = 2'-O-methyladenosine-3'-phosphate
  modified_base 12: mod_base = OTHER; note = 2'-deoxy-2'-fluoroguanosine-3'-phosphate
  modified_base 13: mod_base = OTHER; note = 2'-deoxy-2'-fluoroadenosine-3'-phosphate
  modified_base 14: mod_base = OTHER; note = 2'-deoxy-2'-fluoroadenosine-3'-phosphate
  modified_base 15: mod_base = OTHER; note = 2'-O-methylcytidine-3'-phosphate
  modified_base 16: mod_base = OTHER; note = 2'-deoxy-2'-fluoroadenosine-3'-phosphate
  modified_base 17: mod_base = OTHER; note = 2'-O-methylcytidine-3'-phosphate
  modified_base 18: mod_base = OTHER; note = 2'-deoxy-2'-fluorouridine-3'-phosphate
  modified_base 19: mod_base = OTHER; note = 2'-O-methylguanosine-3'-phosphate
  modified_base 20: mod_base = OTHER; note = 2'-deoxy-2'-fluorouridine-3'-phosphate
  modified_base 21: mod_base = OTHER; note = 2'-O-methyluridine-3'-phosphorothioate
  modified_base 22: mod_base = OTHER; note = 2'-deoxy-2'-fluorouridine-3'-phosphorothioate
  modified_base 23: mod_base = OTHER; note = 2'-O-methyluridine
ttatagagcaagaacactgtttt

SEQ ID NO: 805 - RNA, 23 nt, synthetic construct
  source 1..23: mol_type = other RNA
  modified_base 1: mod_base = OTHER; note = 2'-O-methyluridine-3'-phosphate
  modified_base 2: mod_base = OTHER; note = 2'-deoxy-2'-fluorouridine-3'-phosphate
  modified_base 3: mod_base = OTHER; note = 2'-O-methyladenosine-3'-phosphate
  modified_base 4: mod_base = OTHER; note = 2'-O-methyluridine-3'-phosphate
  modified_base 5: mod_base = OTHER; note = 2'-O-methyladenosine-3'-phosphate
  modified_base 6: mod_base = OTHER; note = 2'-deoxy-2'-fluoroguanosine-3'-phosphate
  modified_base 7: mod_base = OTHER; note = 2'-O-methyladenosine-3'-phosphate
  modified_base 8: mod_base = OTHER; note = 2'-deoxy-2'-fluoroguanosine-3'-phosphate
  modified_base 9: mod_base = OTHER; note = 2'-O-methylcytidine-3'-phosphate
  modified_base 10: mod_base = OTHER; note = 2'-deoxy-2'-fluoroadenosine-3'-phosphate
  modified_base 11: mod_base = OTHER; note = 2'-O-methyladenosine-3'-phosphate
  modified_base 12: mod_base = OTHER; note = 2'-deoxy-2'-fluoroguanosine-3'-phosphate
  modified_base 13: mod_base = OTHER; note = 2'-O-methyladenosine-3'-phosphate
  modified_base 14: mod_base = OTHER; note = 2'-deoxy-2'-fluoroadenosine-3'-phosphate
  modified_base 15: mod_base = OTHER; note = 2'-O-methylcytidine-3'-phosphate
  modified_base 16: mod_base = OTHER; note = 2'-deoxy-2'-fluoroadenosine-3'-phosphate
  modified_base 17: mod_base = OTHER; note = 2'-O-methylcytidine-3'-phosphate
  modified_base 18: mod_base = OTHER; note = 2'-deoxy-2'-fluorouridine-3'-phosphate
  modified_base 19: mod_base = OTHER; note = 2'-O-methylguanosine-3'-phosphate
  modified_base 20: mod_base = OTHER; note = 2'-deoxy-2'-fluorouridine-3'-phosphate
  modified_base 21: mod_base = OTHER; note = 2'-deoxy-2'-fluorouridine-3'-phosphorothioate
  modified_base 22: mod_base = OTHER; note = 2'-deoxy-2'-fluorouridine-3'-phosphorothioate
  modified_base 23: mod_base = OTHER; note = 2'-O-methyluridine
ttatagagcaagaacactgtttt

SEQ ID NO: 806 - RNA, 23 nt, synthetic construct
  source 1..23: mol_type = other RNA
  modified_base 1: mod_base = OTHER; note = 2'-O-methyluridine-3'-phosphate
  modified_base 2: mod_base = OTHER; note = 2'-O-methyluridine-3'-phosphate
  modified_base 3: mod_base = OTHER; note = 2'-O-methyladenosine-3'-phosphate
  modified_base 4: mod_base = OTHER; note = 2'-deoxy-2'-fluorouridine-3'-phosphate
  modified_base 5: mod_base = OTHER; note = 2'-O-methyladenosine-3'-phosphate
  modified_base 6: mod_base = OTHER; note = 2'-deoxy-2'-fluoroguanosine-3'-phosphate
  modified_base 7: mod_base = OTHER; note = 2'-O-methyladenosine-3'-phosphate
  modified_base 8: mod_base = OTHER; note = 2'-deoxy-2'-fluoroguanosine-3'-phosphate
  modified_base 9: mod_base = OTHER; note = 2'-O-methylcytidine-3'-phosphate
  modified_base 10: mod_base = OTHER; note = 2'-deoxy-2'-fluoroadenosine-3'-phosphate
  modified_base 11: mod_base = OTHER; note = 2'-O-methyladenosine-3'-phosphate
  modified_base 12: mod_base = OTHER; note = 2'-deoxy-2'-fluoroguanosine-3'-phosphate
  modified_base 13: mod_base = OTHER; note = 2'-O-methyladenosine-3'-phosphate
  modified_base 14: mod_base = OTHER; note = 2'-deoxy-2'-fluoroadenosine-3'-phosphate
  modified_base 15: mod_base = OTHER; note = 2'-O-methylcytidine-3'-phosphate
  modified_base 16: mod_base = OTHER; note = 2'-deoxy-2'-fluoroadenosine-3'-phosphate
  modified_base 17: mod_base = OTHER; note = 2'-deoxy-2'-fluorocytidine-3'-phosphate
  modified_base 18: mod_base = OTHER; note = 2'-deoxy-2'-fluorouridine-3'-phosphate
  modified_base 19: mod_base = OTHER; note = 2'-O-methylguanosine-3'-phosphate
  modified_base 20: mod_base = OTHER; note = 2'-deoxy-2'-fluorouridine-3'-phosphate
  modified_base 21: mod_base = OTHER; note = 2'-O-methyluridine-3'-phosphorothioate
  modified_base 22: mod_base = OTHER; note = 2'-deoxy-2'-fluorouridine-3'-phosphorothioate
  modified_base 23: mod_base = OTHER; note = 2'-O-methyluridine
ttatagagcaagaacactgtttt

SEQ ID NO: 807 - RNA, 23 nt, synthetic construct
  source 1..23: mol_type = other RNA
  modified_base 1: mod_base = OTHER; note = 2'-O-methyluridine-3'-phosphate
  modified_base 2: mod_base = OTHER; note = 2'-deoxy-2'-fluorouridine-3'-phosphate
  modified_base 3: mod_base = OTHER; note = 2'-O-methyladenosine-3'-phosphate
  modified_base 4: mod_base = OTHER; note = 2'-deoxy-2'-fluorouridine-3'-phosphate
  modified_base 5: mod_base = OTHER; note = 2'-O-methyladenosine-3'-phosphate
  modified_base 6: mod_base = OTHER; note = 2'-deoxy-2'-fluoroguanosine-3'-phosphate
  modified_base 7: mod_base = OTHER; note = 2'-O-methyladenosine-3'-phosphate
  modified_base 8: mod_base = OTHER; note = 2'-O-methylguanosine-3'-phosphate
  modified_base 9: mod_base = OTHER; note = 2'-O-methylcytidine-3'-phosphate
  modified_base 10: mod_base = OTHER; note = 2'-deoxy-2'-fluoroadenosine-3'-phosphate
  modified_base 11: mod_base = OTHER; note = 2'-O-methyladenosine-3'-phosphate
  modified_base 12: mod_base = OTHER; note = 2'-deoxy-2'-fluoroguanosine-3'-phosphate
  modified_base 13: mod_base = OTHER; note = 2'-O-methyladenosine-3'-phosphate
  modified_base 14: mod_base = OTHER; note = 2'-deoxy-2'-fluoroadenosine-3'-phosphate
  modified_base 15: mod_base = OTHER; note = 2'-deoxy-2'-fluorocytidine-3'-phosphate
  modified_base 16: mod_base = OTHER; note = 2'-deoxy-2'-fluoroadenosine-3'-phosphate
  modified_base 17: mod_base = OTHER; note = 2'-O-methylcytidine-3'-phosphate
  modified_base 18: mod_base = OTHER; note = 2'-deoxy-2'-fluorouridine-3'-phosphate
  modified_base 19: mod_base = OTHER; note = 2'-O-methylguanosine-3'-phosphate
  modified_base 20: mod_base = OTHER; note = 2'-deoxy-2'-fluorouridine-3'-phosphate
  modified_base 21: mod_base = OTHER; note = 2'-O-methyluridine-3'-phosphorothioate
  modified_base 22: mod_base = OTHER; note = 2'-deoxy-2'-fluorouridine-3'-phosphorothioate
  modified_base 23: mod_base = OTHER; note = 2'-O-methyluridine
ttatagagcaagaacactgtttt

SEQ ID NO: 808 - RNA, 23 nt, synthetic construct
  source 1..23: mol_type = other RNA
  modified_base 1: mod_base = OTHER; note = 2'-O-methyluridine-3'-phosphate
  modified_base 2: mod_base = OTHER; note = 2'-deoxy-2'-fluorouridine-3'-phosphate
  modified_base 3: mod_base = OTHER; note = 2'-O-methyladenosine-3'-phosphate
  modified_base 4: mod_base = OTHER; note = 2'-deoxy-2'-fluorouridine-3'-phosphate
  modified_base 5: mod_base = OTHER; note = 2'-O-methyladenosine-3'-phosphate
  modified_base 6: mod_base = OTHER; note = 2'-O-methylguanosine-3'-phosphate
  modified_base 7: mod_base = OTHER; note = 2'-O-methyladenosine-3'-phosphate
  modified_base 8: mod_base = OTHER; note = 2'-deoxy-2'-fluoroguanosine-3'-phosphate
  modified_base 9: mod_base = OTHER; note = 2'-O-methylcytidine-3'-phosphate
  modified_base 10: mod_base = OTHER; note = 2'-deoxy-2'-fluoroadenosine-3'-phosphate
  modified_base 11: mod_base = OTHER; note = 2'-deoxy-2'-fluoroadenosine-3'-phosphate
  modified_base 12: mod_base = OTHER; note = 2'-deoxy-2'-fluoroguanosine-3'-phosphate
  modified_base 13: mod_base = OTHER; note = 2'-O-methyladenosine-3'-phosphate
  modified_base 14: mod_base = OTHER; note = 2'-deoxy-2'-fluoroadenosine-3'-phosphate
  modified_base 15: mod_base = OTHER; note = 2'-O-methylcytidine-3'-phosphate
  modified_base 16: mod_base = OTHER; note = 2'-deoxy-2'-fluoroadenosine-3'-phosphate
  modified_base 17: mod_base = OTHER; note = 2'-O-methylcytidine-3'-phosphate
  modified_base 18: mod_base = OTHER; note = 2'-deoxy-2'-fluorouridine-3'-phosphate
  modified_base 19: mod_base = OTHER; note = 2'-O-methylguanosine-3'-phosphate
  modified_base 20: mod_base = OTHER; note = 2'-deoxy-2'-fluorouridine-3'-phosphate
  modified_base 21: mod_base = OTHER; note = 2'-O-methyluridine-3'-phosphorothioate
  modified_base 22: mod_base = OTHER; note = 2'-deoxy-2'-fluorouridine-3'-phosphorothioate
  modified_base 23: mod_base = OTHER; note = 2'-O-methyluridine
ttatagagcaagaacactgtttt

SEQ ID NO: 809 - RNA, 23 nt, synthetic construct
  source 1..23: mol_type = other RNA
  modified_base 1: mod_base = OTHER; note = 2'-O-methyluridine-3'-phosphate
  modified_base 2: mod_base = OTHER; note = 2'-deoxy-2'-fluorouridine-3'-phosphate
  modified_base 3: mod_base = OTHER; note = 2'-O-methyladenosine-3'-phosphate
  modified_base 4: mod_base = OTHER; note = 2'-O-methyluridine-3'-phosphate
  modified_base 5: mod_base = OTHER; note = 2'-O-methyladenosine-3'-phosphate
  modified_base 6: mod_base = OTHER; note = 2'-deoxy-2'-fluoroguanosine-3'-phosphate
  modified_base 7: mod_base = OTHER; note = 2'-O-methyladenosine-3'-phosphate
  modified_base 8: mod_base = OTHER; note = 2'-deoxy-2'-fluoroguanosine-3'-phosphate
  modified_base 9: mod_base = OTHER; note = 2'-O-methylcytidine-3'-phosphate
  modified_base 10: mod_base = OTHER; note = 2'-deoxy-2'-fluoroadenosine-3'-phosphate
  modified_base 11: mod_base = OTHER; note = 2'-O-methyladenosine-3'-phosphate
  modified_base 12: mod_base = OTHER; note = 2'-deoxy-2'-fluoroguanosine-3'-phosphate
  modified_base 13: mod_base = OTHER; note = 2'-O-methyladenosine-3'-phosphate
  modified_base 14: mod_base = OTHER; note = 2'-deoxy-2'-fluoroadenosine-3'-phosphate
  modified_base 15: mod_base = OTHER; note = 2'-O-methylcytidine-3'-phosphate
  modified_base 16: mod_base = OTHER; note = 2'-deoxy-2'-fluoroadenosine-3'-phosphate
  modified_base 17: mod_base = OTHER; note = 2'-O-methylcytidine-3'-phosphate
  modified_base 18: mod_base = OTHER; note = 2'-deoxy-2'-fluorouridine-3'-phosphate
  modified_base 19: mod_base = OTHER; note = 2'-O-methylguanosine-3'-phosphate
  modified_base 20: mod_base = OTHER; note = 2'-deoxy-2'-fluorouridine-3'-phosphate
  modified_base 21: mod_base = OTHER; note = 2'-O-methyluridine-3'-phosphorothioate
  modified_base 22: mod_base = OTHER; note = 2'-deoxy-2'-fluorouridine-3'-phosphorothioate
  modified_base 23: mod_base = OTHER; note = 2'-deoxy-2'-fluorouridine
ttatagagcaagaacactgtttt

SEQ ID NO: 810 - RNA, 23 nt, synthetic construct
  source 1..23: mol_type = other RNA
  modified_base 1: mod_base = OTHER; note = 2'-O-methyluridine-3'-phosphate
  modified_base 2: mod_base = OTHER; note = 2'-O-methyluridine-3'-phosphate
  modified_base 3: mod_base = OTHER; note = 2'-O-methyladenosine-3'-phosphate
  modified_base 4: mod_base = OTHER; note = 2'-deoxy-2'-fluorouridine-3'-phosphate
  modified_base 5: mod_base = OTHER; note = 2'-O-methyladenosine-3'-phosphate
  modified_base 6: mod_base = OTHER; note = 2'-deoxy-2'-fluoroguanosine-3'-phosphate
  modified_base 7: mod_base = OTHER; note = 2'-O-methyladenosine-3'-phosphate
  modified_base 8: mod_base = OTHER; note = 2'-deoxy-2'-fluoroguanosine-3'-phosphate
  modified_base 9: mod_base = OTHER; note = 2'-O-methylcytidine-3'-phosphate
  modified_base 10: mod_base = OTHER; note = 2'-deoxy-2'-fluoroadenosine-3'-phosphate
  modified_base 11: mod_base = OTHER; note = 2'-O-methyladenosine-3'-phosphate
  modified_base 12: mod_base = OTHER; note = 2'-deoxy-2'-fluoroguanosine-3'-phosphate
  modified_base 13: mod_base = OTHER; note = 2'-O-methyladenosine-3'-phosphate
  modified_base 14: mod_base = OTHER; note = 2'-deoxy-2'-fluoroadenosine-3'-phosphate
  modified_base 15: mod_base = OTHER; note = 2'-O-methylcytidine-3'-phosphate
  modified_base 16: mod_base = OTHER; note = 2'-deoxy-2'-fluoroadenosine-3'-phosphate
  modified_base 17: mod_base = OTHER; note = 2'-O-methylcytidine-3'-phosphate
  modified_base 18: mod_base = OTHER; note = 2'-deoxy-2'-fluorouridine-3'-phosphate
  modified_base 19: mod_base = OTHER; note = 2'-deoxy-2'-fluoroguanosine-3'-phosphate
  modified_base 20: mod_base = OTHER; note = 2'-deoxy-2'-fluorouridine-3'-phosphate
  modified_base 21: mod_base = OTHER; note = 2'-O-methyluridine-3'-phosphorothioate
  modified_base 22: mod_base = OTHER; note = 2'-deoxy-2'-fluorouridine-3'-phosphorothioate
  modified_base 23: mod_base = OTHER; note = 2'-O-methyluridine
ttatagagcaagaacactgtttt

SEQ ID NO: 811 - DNA, 23 bp, synthetic construct
  source 1..23: mol_type = other DNA
  modified_base 1: mod_base = OTHER; note = 2'-O-methyluridine-3'-phosphate
  modified_base 2: mod_base = OTHER; note = 2'-deoxy-2'-fluorouridine-3'-phosphate
  modified_base 4: mod_base = OTHER; note = uridine-3'-phosphate
  modified_base 6: mod_base = OTHER; note = 2'-deoxy-2'-fluoroguanosine-3'-phosphate
  modified_base 7: mod_base = OTHER; note = 2'-O-methyladenosine-3'-phosphate
  modified_base 8: mod_base = OTHER; note = 2'-deoxy-2'-fluoroguanosine-3'-phosphate
  modified_base 9: mod_base = OTHER; note = 2'-O-methylcytidine-3'-phosphate
  modified_base 10: mod_base = OTHER; note = 2'-deoxy-2'-fluoroadenosine-3'-phosphate
  modified_base 11: mod_base = OTHER; note = 2'-O-methyladenosine-3'-phosphate
  modified_base 12: mod_base = OTHER; note = 2'-deoxy-2'-fluoroguanosine-3'-phosphate
  modified_base 13: mod_base = OTHER; note = 2'-O-methyladenosine-3'-phosphate
  modified_base 14: mod_base = OTHER; note = 2'-O-methyladenosine-3'-phosphate
  modified_base 16: mod_base = OTHER; note = 2'-O-methyladenosine-3'-phosphate
  modified_base 18: mod_base = OTHER; note = 2'-O-methyluridine-3'-phosphate
  modified_base 21: mod_base = OTHER; note = 2'-deoxythymidine-3'-phosphorothioate
  modified_base 22: mod_base = OTHER; note = 2'-O-methyluridine-3'-phosphorothioate
  modified_base 23: mod_base = OTHER; note = 2'-O-methyluridine
  misc_feature 1..2: note = RNA
  misc_feature 4: note = RNA
  misc_feature 6..14: note = RNA
  misc_feature 16: note = RNA
  misc_feature 18: note = RNA
  misc_feature 22..23: note = RNA
  misc_feature 3: note = DNA
  misc_feature 5: note = DNA
  misc_feature 15: note = DNA
  misc_feature 17: note = DNA
  misc_feature 19..21: note = DNA
ttatagagcaagaacactgtttt

SEQ ID NO: 812 - RNA, 23 nt, synthetic construct
  source 1..23: mol_type = other RNA
  modified_base 1: mod_base = OTHER; note = 2'-O-methyluridine-3'-phosphate
  modified_base 2: mod_base = OTHER; note = 2'-deoxy-2'-fluorouridine-3'-phosphate
  modified_base 3: mod_base = OTHER; note = 2'-O-methyladenosine-3'-phosphate
  modified_base 4: mod_base = OTHER; note = 2'-deoxy-2'-fluorouridine-3'-phosphate
  modified_base 5: mod_base = OTHER; note = 2'-O-methyladenosine-3'-phosphate
  modified_base 6: mod_base = OTHER; note = 2'-deoxy-2'-fluoroguanosine-3'-phosphate
  modified_base 7: mod_base = OTHER; note = 2'-O-methyladenosine-3'-phosphate
  modified_base 8: mod_base = OTHER; note = 2'-O-methylguanosine-3'-phosphate
  modified_base 9: mod_base = OTHER; note = 2'-O-methylcytidine-3'-phosphate
  modified_base 10: mod_base = OTHER; note = 2'-deoxy-2'-fluoroadenosine-3'-phosphate
  modified_base 11: mod_base = OTHER; note = 2'-O-methyladenosine-3'-phosphate
  modified_base 12: mod_base = OTHER; note = 2'-deoxy-2'-fluoroguanosine-3'-phosphate
  modified_base 13: mod_base = OTHER; note = 2'-O-methyladenosine-3'-phosphate
  modified_base 14: mod_base = OTHER; note = 2'-deoxy-2'-fluoroadenosine-3'-phosphate
  modified_base 15: mod_base = OTHER; note = 2'-O-methylcytidine-3'-phosphate
  modified_base 16: mod_base = OTHER; note = 2'-deoxy-2'-fluoroadenosine-3'-phosphate
  modified_base 17: mod_base = OTHER; note = 2'-deoxy-2'-fluorocytidine-3'-phosphate
  modified_base 18: mod_base = OTHER; note = 2'-deoxy-2'-fluorouridine-3'-phosphate
  modified_base 19: mod_base = OTHER; note = 2'-O-methylguanosine-3'-phosphate
  modified_base 20: mod_base = OTHER; note = 2'-deoxy-2'-fluorouridine-3'-phosphate
  modified_base 21: mod_base = OTHER; note = 2'-O-methyluridine-3'-phosphorothioate
  modified_base 22: mod_base = OTHER; note = 2'-deoxy-2'-fluorouridine-3'-phosphorothioate
  modified_base 23: mod_base = OTHER; note = 2'-O-methyluridine
ttatagagcaagaacactgtttt

SEQ ID NO: 813 - RNA, 23 nt, synthetic construct
  source 1..23: mol_type = other RNA
  modified_base 1: mod_base = OTHER; note = 2'-O-methyluridine-3'-phosphate
  modified_base 2: mod_base = OTHER; note = 2'-deoxy-2'-fluorouridine-3'-phosphate
  modified_base 3: mod_base = OTHER; note = 2'-O-methyladenosine-3'-phosphate
  modified_base 4: mod_base = OTHER; note = 2'-deoxy-2'-fluorouridine-3'-phosphate
  modified_base 5: mod_base = OTHER; note = 2'-O-methyladenosine-3'-phosphate
  modified_base 6: mod_base = OTHER; note = 2'-O-methylguanosine-3'-phosphate
  modified_base 7: mod_base = OTHER; note = 2'-O-methyladenosine-3'-phosphate
  modified_base 8: mod_base = OTHER; note = 2'-deoxy-2'-fluoroguanosine-3'-phosphate
  modified_base 9: mod_base = OTHER; note = 2'-O-methylcytidine-3'-phosphate
  modified_base 10: mod_base = OTHER; note = 2'-deoxy-2'-fluoroadenosine-3'-phosphate
  modified_base 11: mod_base = OTHER; note = 2'-O-methyladenosine-3'-phosphate
  modified_base 12: mod_base = OTHER; note = 2'-deoxy-2'-fluoroguanosine-3'-phosphate
  modified_base 13: mod_base = OTHER; note = 2'-deoxy-2'-fluoroadenosine-3'-phosphate
  modified_base 14: mod_base = OTHER; note = 2'-deoxy-2'-fluoroadenosine-3'-phosphate
  modified_base 15: mod_base = OTHER; note = 2'-O-methylcytidine-3'-phosphate
  modified_base 16: mod_base = OTHER; note = 2'-deoxy-2'-fluoroadenosine-3'-phosphate
  modified_base 17: mod_base = OTHER; note = 2'-O-methylcytidine-3'-phosphate
  modified_base 18: mod_base = OTHER; note = 2'-deoxy-2'-fluorouridine-3'-phosphate
  modified_base 19: mod_base = OTHER; note = 2'-O-methylguanosine-3'-phosphate
  modified_base 20: mod_base = OTHER; note = 2'-deoxy-2'-fluorouridine-3'-phosphate
  modified_base 21: mod_base = OTHER; note = 2'-O-methyluridine-3'-phosphorothioate
  modified_base 22: mod_base = OTHER; note = 2'-deoxy-2'-fluorouridine-3'-phosphorothioate
  modified_base 23: mod_base = OTHER; note = 2'-O-methyluridine
ttatagagcaagaacactgtttt

SEQ ID NO: 814 - RNA, 23 nt, synthetic construct
  source 1..23: mol_type = other RNA
  modified_base 1: mod_base = OTHER; note = 2'-O-methyluridine-3'-phosphate
  modified_base 2: mod_base = OTHER; note = 2'-O-methyluridine-3'-phosphate
  modified_base 3: mod_base = OTHER; note = 2'-O-methyladenosine-3'-phosphate
  modified_base 4: mod_base = OTHER; note = 2'-deoxy-2'-fluorouridine-3'-phosphate
  modified_base 5: mod_base = OTHER; note = 2'-deoxy-2'-fluoroadenosine-3'-phosphate
  modified_base 6: mod_base = OTHER; note = 2'-deoxy-2'-fluoroguanosine-3'-phosphate
  modified_base 7: mod_base = OTHER; note = 2'-O-methyladenosine-3'-phosphate
  modified_base 8: mod_base = OTHER; note = 2'-deoxy-2'-fluoroguanosine-3'-phosphate
  modified_base 9: mod_base = OTHER; note = 2'-O-methylcytidine-3'-phosphate
  modified_base 10: mod_base = OTHER; note = 2'-deoxy-2'-fluoroadenosine-3'-phosphate
  modified_base 11: mod_base = OTHER; note = 2'-O-methyladenosine-3'-phosphate
  modified_base 12: mod_base = OTHER; note = 2'-deoxy-2'-fluoroguanosine-3'-phosphate
  modified_base 13: mod_base = OTHER; note = 2'-O-methyladenosine-3'-phosphate
  modified_base 14: mod_base = OTHER; note = 2'-deoxy-2'-fluoroadenosine-3'-phosphate
  modified_base 15: mod_base = OTHER; note = 2'-O-methylcytidine-3'-phosphate
  modified_base 16: mod_base = OTHER; note = 2'-deoxy-2'-fluoroadenosine-3'-phosphate
  modified_base 17: mod_base = OTHER; note = 2'-O-methylcytidine-3'-phosphate
  modified_base 18: mod_base = OTHER; note = 2'-deoxy-2'-fluorouridine-3'-phosphate
  modified_base 19: mod_base = OTHER; note = 2'-O-methylguanosine-3'-phosphate
  modified_base 20: mod_base = OTHER; note = 2'-deoxy-2'-fluorouridine-3'-phosphate
  modified_base 21: mod_base = OTHER; note = 2'-O-methyluridine-3'-phosphorothioate
  modified_base 22: mod_base = OTHER; note = 2'-deoxy-2'-fluorouridine-3'-phosphorothioate
  modified_base 23: mod_base = OTHER; note = 2'-O-methyluridine
ttatagagcaagaacactgtttt

SEQ ID NO: 815 - RNA, 23 nt, synthetic construct
  source 1..23: mol_type = other RNA
  modified_base 1: mod_base = OTHER; note = 2'-O-methyluridine-3'-phosphate
  modified_base 2: mod_base = OTHER; note = 2'-O-methyluridine-3'-phosphate
  modified_base 3: mod_base = OTHER; note = 2'-O-methyladenosine-3'-phosphate
  modified_base 4: mod_base = OTHER; note = 2'-deoxy-2'-fluorouridine-3'-phosphate
  modified_base 5: mod_base = OTHER; note = 2'-O-methyladenosine-3'-phosphate
  modified_base 6: mod_base = OTHER; note = 2'-deoxy-2'-fluoroguanosine-3'-phosphate
  modified_base 7: mod_base = OTHER; note = 2'-O-methyladenosine-3'-phosphate
  modified_base 8: mod_base = OTHER; note = 2'-deoxy-2'-fluoroguanosine-3'-phosphate
  modified_base 9: mod_base = OTHER; note = 2'-O-methylcytidine-3'-phosphate
  modified_base 10: mod_base = OTHER; note = 2'-deoxy-2'-fluoroadenosine-3'-phosphate
  modified_base 11: mod_base = OTHER; note = 2'-O-methyladenosine-3'-phosphate
  modified_base 12: mod_base = OTHER; note = 2'-deoxy-2'-fluoroguanosine-3'-phosphate
  modified_base 13: mod_base = OTHER; note = 2'-O-methyladenosine-3'-phosphate
  modified_base 14: mod_base = OTHER; note = 2'-deoxy-2'-fluoroadenosine-3'-phosphate
  modified_base 15: mod_base = OTHER; note = 2'-O-methylcytidine-3'-phosphate
  modified_base 16: mod_base = OTHER; note = 2'-deoxy-2'-fluoroadenosine-3'-phosphate
  modified_base 17: mod_base = OTHER; note = 2'-O-methylcytidine-3'-phosphate
  modified_base 18: mod_base = OTHER; note = 2'-deoxy-2'-fluorouridine-3'-phosphate
  modified_base 19: mod_base = OTHER; note = 2'-O-methylguanosine-3'-phosphate
  modified_base 20: mod_base = OTHER; note = 2'-deoxy-2'-fluorouridine-3'-phosphate
  modified_base 21: mod_base = OTHER; note = 2'-deoxy-2'-fluorouridine-3'-phosphorothioate
  modified_base 22: mod_base = OTHER; note = 2'-deoxy-2'-fluorouridine-3'-phosphorothioate
  modified_base 23: mod_base = OTHER; note = 2'-O-methyluridine
ttatagagcaagaacactgtttt

SEQ ID NO: 816 - DNA, 23 bp, synthetic construct
  source 1..23: mol_type = other DNA
  modified_base 1: mod_base = OTHER; note = 2'-O-methyluridine-3'-phosphate
  modified_base 2: mod_base = OTHER; note = 2'-deoxy-2'-fluorouridine-3'-phosphate
  modified_base 4: mod_base = OTHER; note = uridine-3'-phosphate
  modified_base 6: mod_base = OTHER; note = 2'-deoxy-2'-fluoroguanosine-3'-phosphate
  modified_base 7: mod_base = OTHER; note = 2'-O-methyladenosine-3'-phosphate
  modified_base 8: mod_base = OTHER; note = 2'-deoxy-2'-fluoroguanosine-3'-phosphate
  modified_base 9: mod_base = OTHER; note = 2'-O-methylcytidine-3'-phosphate
  modified_base 10: mod_base = OTHER; note = 2'-deoxy-2'-fluoroadenosine-3'-phosphate
  modified_base 11: mod_base = OTHER; note = 2'-O-methyladenosine-3'-phosphate
  modified_base 12: mod_base = OTHER; note = 2'-deoxy-2'-fluoroguanosine-3'-phosphate
  modified_base 13: mod_base = OTHER; note = 2'-O-methyladenosine-3'-phosphate
  modified_base 14: mod_base = OTHER; note = 2'-O-methyladenosine-3'-phosphate
  modified_base 16: mod_base = OTHER; note = 2'-O-methyladenosine-3'-phosphate
  modified_base 18: mod_base = OTHER; note = 2'-O-methyluridine-3'-phosphate
  modified_base 20: mod_base = OTHER; note = 2'-O-methyluridine-3'-phosphate
  modified_base 21: mod_base = OTHER; note = 2'-deoxythymidine-3'-phosphorothioate
  modified_base 22: mod_base = OTHER; note = 2'-O-methyluridine-3'-phosphorothioate
  modified_base 23: mod_base = OTHER; note = 2'-O-methyluridine
  misc_feature 1..2: note = RNA
  misc_feature 4: note = RNA
  misc_feature 6..14: note = RNA
  misc_feature 16: note = RNA
  misc_feature 18: note = RNA
  misc_feature 20: note = RNA
  misc_feature 22..23: note = RNA
  misc_feature 3: note = DNA
  misc_feature 5: note = DNA
  misc_feature 15: note = DNA
  misc_feature 17: note = DNA
  misc_feature 19: note = DNA
  misc_feature 21: note = DNA
ttatagagcaagaacactgtttt

SEQ ID NO: 817 - RNA, 23 nt, synthetic construct
  source 1..23: mol_type = other RNA
  modified_base 1: mod_base = OTHER; note = 2'-O-methyluridine-3'-phosphate
  modified_base 2: mod_base = OTHER; note = 2'-deoxy-2'-fluorouridine-3'-phosphate
  modified_base 3: mod_base = OTHER; note = 2'-O-methyladenosine-3'-phosphate
  modified_base 4: mod_base = OTHER; note = 2'-deoxy-2'-fluorouridine-3'-phosphate
  modified_base 5: mod_base = OTHER; note = 2'-O-methyladenosine-3'-phosphate
  modified_base 6: mod_base = OTHER; note = 2'-deoxy-2'-fluoroguanosine-3'-phosphate
  modified_base 7: mod_base = OTHER; note = 2'-O-methyladenosine-3'-phosphate
  modified_base 8: mod_base = OTHER; note = 2'-O-methylguanosine-3'-phosphate
  modified_base 9: mod_base = OTHER; note = 2'-O-methylcytidine-3'-phosphate
  modified_base 10: mod_base = OTHER; note = 2'-deoxy-2'-fluoroadenosine-3'-phosphate
  modified_base 11: mod_base = OTHER; note = 2'-O-methyladenosine-3'-phosphate
  modified_base 12: mod_base = OTHER; note = 2'-deoxy-2'-fluoroguanosine-3'-phosphate
  modified_base 13: mod_base = OTHER; note = 2'-O-methyladenosine-3'-phosphate
  modified_base 14: mod_base = OTHER; note = 2'-deoxy-2'-fluoroadenosine-3'-phosphate
  modified_base 15: mod_base = OTHER; note = 2'-O-methylcytidine-3'-phosphate
  modified_base 16: mod_base = OTHER; note = 2'-deoxy-2'-fluoroadenosine-3'-phosphate
  modified_base 17: mod_base = OTHER; note = 2'-O-methylcytidine-3'-phosphate
  modified_base 18: mod_base = OTHER; note = 2'-deoxy-2'-fluorouridine-3'-phosphate
  modified_base 19: mod_base = OTHER; note = 2'-deoxy-2'-fluoroguanosine-3'-phosphate
  modified_base 20: mod_base = OTHER; note = 2'-deoxy-2'-fluorouridine-3'-phosphate
  modified_base 21: mod_base = OTHER; note = 2'-O-methyluridine-3'-phosphorothioate
  modified_base 22: mod_base = OTHER; note = 2'-deoxy-2'-fluorouridine-3'-phosphorothioate
  modified_base 23: mod_base = OTHER; note = 2'-O-methyluridine
ttatagagcaagaacactgtttt

SEQ ID NO: 818 - RNA, 23 nt, synthetic construct
  source 1..23: mol_type = other RNA
  modified_base 1: mod_base = OTHER; note = 2'-O-methyluridine-3'-phosphate
  modified_base 2: mod_base = OTHER; note = 2'-deoxy-2'-fluorouridine-3'-phosphate
  modified_base 3: mod_base = OTHER; note = 2'-O-methyladenosine-3'-phosphate
  modified_base 4: mod_base = OTHER; note = 2'-deoxy-2'-fluorouridine-3'-phosphate
  modified_base 5: mod_base = OTHER; note = 2'-O-methyladenosine-3'-phosphate
  modified_base 6: mod_base = OTHER; note = 2'-O-methylguanosine-3'-phosphate
  modified_base 7: mod_base = OTHER; note = 2'-O-methyladenosine-3'-phosphate
  modified_base 8: mod_base = OTHER; note = 2'-deoxy-2'-fluoroguanosine-3'-phosphate
  modified_base 9: mod_base = OTHER; note = 2'-O-methylcytidine-3'-phosphate
  modified_base 10: mod_base = OTHER; note = 2'-deoxy-2'-fluoroadenosine-3'-phosphate
  modified_base 11: mod_base = OTHER; note = 2'-O-methyladenosine-3'-phosphate
  modified_base 12: mod_base = OTHER; note = 2'-deoxy-2'-fluoroguanosine-3'-phosphate
  modified_base 13: mod_base = OTHER; note = 2'-O-methyladenosine-3'-phosphate
  modified_base 14: mod_base = OTHER; note = 2'-deoxy-2'-fluoroadenosine-3'-phosphate
  modified_base 15: mod_base = OTHER; note = 2'-deoxy-2'-fluorocytidine-3'-phosphate
  modified_base 16: mod_base = OTHER; note = 2'-deoxy-2'-fluoroadenosine-3'-phosphate
  modified_base 17: mod_base = OTHER; note = 2'-O-methylcytidine-3'-phosphate
  modified_base 18: mod_base = OTHER; note = 2'-deoxy-2'-fluorouridine-3'-phosphate
  modified_base 19: mod_base = OTHER; note = 2'-O-methylguanosine-3'-phosphate
  modified_base 20: mod_base = OTHER; note = 2'-deoxy-2'-fluorouridine-3'-phosphate
  modified_base 21: mod_base = OTHER; note = 2'-O-methyluridine-3'-phosphorothioate
  modified_base 22: mod_base = OTHER; note = 2'-deoxy-2'-fluorouridine-3'-phosphorothioate
  modified_base 23: mod_base = OTHER; note = 2'-O-methyluridine
ttatagagcaagaacactgtttt

SEQ ID NO: 819 - RNA, 23 nt, synthetic construct
  source 1..23: mol_type = other RNA
  modified_base 1: mod_base = OTHER; note = 2'-O-methyluridine-3'-phosphate
  modified_base 2: mod_base = OTHER; note = 2'-deoxy-2'-fluorouridine-3'-phosphate
  modified_base 3: mod_base = OTHER; note = 2'-O-methyladenosine-3'-phosphate
  modified_base 4: mod_base = OTHER; note = 2'-O-methyluridine-3'-phosphate
  modified_base 5: mod_base = OTHER; note = 2'-O-methyladenosine-3'-phosphate
  modified_base 6: mod_base = OTHER; note = 2'-deoxy-2'-fluoroguanosine-3'-phosphate
  modified_base 7: mod_base = OTHER; note = 2'-O-methyladenosine-3'-phosphate
  modified_base 8: mod_base = OTHER; note = 2'-deoxy-2'-fluoroguanosine-3'-phosphate
  modified_base 9: mod_base = OTHER; note = 2'-O-methylcytidine-3'-phosphate
  modified_base 10: mod_base = OTHER; note = 2'-deoxy-2'-fluoroadenosine-3'-phosphate
  modified_base 11: mod_base = OTHER; note = 2'-deoxy-2'-fluoroadenosine-3'-phosphate
  modified_base 12: mod_base = OTHER; note = 2'-deoxy-2'-fluoroguanosine-3'-phosphate
  modified_base 13: mod_base = OTHER; note = 2'-O-methyladenosine-3'-phosphate
  modified_base 14: mod_base = OTHER; note = 2'-deoxy-2'-fluoroadenosine-3'-phosphate
  modified_base 15: mod_base = OTHER; note = 2'-O-methylcytidine-3'-phosphate
  modified_base 16: mod_base = OTHER; note = 2'-deoxy-2'-fluoroadenosine-3'-phosphate
  modified_base 17: mod_base = OTHER; note = 2'-O-methylcytidine-3'-phosphate
  modified_base 18: mod_base = OTHER; note = 2'-deoxy-2'-fluorouridine-3'-phosphate
  modified_base 19: mod_base = OTHER; note = 2'-O-methylguanosine-3'-phosphate
  modified_base 20: mod_base = OTHER; note = 2'-deoxy-2'-fluorouridine-3'-phosphate
  modified_base 21: mod_base = OTHER; note = 2'-O-methyluridine-3'-phosphorothioate
  modified_base 22: mod_base = OTHER; note = 2'-deoxy-2'-fluorouridine-3'-phosphorothioate
  modified_base 23: mod_base = OTHER; note = 2'-O-methyluridine
ttatagagcaagaacactgtttt

SEQ ID NO: 820 - RNA, 23 nt, synthetic construct
  source 1..23: mol_type = other RNA
  modified_base 1: mod_base = OTHER; note = 2'-O-methyluridine-3'-phosphate
  modified_base 2: mod_base = OTHER; note = 2'-O-methyluridine-3'-phosphate
  modified_base 3: mod_base = OTHER; note = 2'-O-methyladenosine-3'-phosphate
  modified_base 4: mod_base = OTHER; note = 2'-deoxy-2'-fluorouridine-3'-phosphate
  modified_base 5: mod_base = OTHER; note = 2'-O-methyladenosine-3'-phosphate
  modified_base 6: mod_base = OTHER; note = 2'-deoxy-2'-fluoroguanosine-3'-phosphate
  modified_base 7: mod_base = OTHER; note = 2'-deoxy-2'-fluoroadenosine-3'-phosphate
  modified_base 8: mod_base = OTHER; note = 2'-deoxy-2'-fluoroguanosine-3'-phosphate
  modified_base 9: mod_base = OTHER; note = 2'-O-methylcytidine-3'-phosphate
  modified_base 10: mod_base = OTHER; note = 2'-deoxy-2'-fluoroadenosine-3'-phosphate
  modified_base 11: mod_base = OTHER; note = 2'-O-methyladenosine-3'-phosphate
  modified_base 12: mod_base = OTHER; note = 2'-deoxy-2'-fluoroguanosine-3'-phosphate
  modified_base 13: mod_base = OTHER; note = 2'-O-methyladenosine-3'-phosphate
  modified_base 14: mod_base = OTHER; note = 2'-deoxy-2'-fluoroadenosine-3'-phosphate
  modified_base 15: mod_base = OTHER; note = 2'-O-methylcytidine-3'-phosphate
  modified_base 16: mod_base = OTHER; note = 2'-deoxy-2'-fluoroadenosine-3'-phosphate
  modified_base 17: mod_base = OTHER; note = 2'-O-methylcytidine-3'-phosphate
  modified_base 18: mod_base = OTHER; note = 2'-deoxy-2'-fluorouridine-3'-phosphate
  modified_base 19: mod_base = OTHER; note = 2'-O-methylguanosine-3'-phosphate
  modified_base 20: mod_base = OTHER; note = 2'-deoxy-2'-fluorouridine-3'-phosphate
  modified_base 21: mod_base = OTHER; note = 2'-O-methyluridine-3'-phosphorothioate
  modified_base 22: mod_base = OTHER; note = 2'-deoxy-2'-fluorouridine-3'-phosphorothioate
  modified_base 23: mod_base = OTHER; note = 2'-O-methyluridine
ttatagagcaagaacactgtttt

SEQ ID NO: 821 - RNA, 23 nt, synthetic construct
  source 1..23: mol_type = other RNA
  modified_base 1: mod_base = OTHER; note = 2'-O-methyluridine-3'-phosphate
  modified_base 2: mod_base = OTHER; note = 2'-O-methyluridine-3'-phosphate
  modified_base 3: mod_base = OTHER; note = 2'-O-methyladenosine-3'-phosphate
  modified_base 4: mod_base = OTHER; note = 2'-deoxy-2'-fluorouridine-3'-phosphate
  modified_base 5: mod_base = OTHER; note = 2'-O-methyladenosine-3'-phosphate
  modified_base 6: mod_base = OTHER; note = 2'-deoxy-2'-fluoroguanosine-3'-phosphate
  modified_base 7: mod_base = OTHER; note = 2'-O-methyladenosine-3'-phosphate
  modified_base 8: mod_base = OTHER; note = 2'-deoxy-2'-fluoroguanosine-3'-phosphate
  modified_base 9: mod_base = OTHER; note = 2'-O-methylcytidine-3'-phosphate
  modified_base 10: mod_base = OTHER; note = 2'-deoxy-2'-fluoroadenosine-3'-phosphate
  modified_base 11: mod_base = OTHER; note = 2'-O-methyladenosine-3'-phosphate
  modified_base 12: mod_base = OTHER; note = 2'-deoxy-2'-fluoroguanosine-3'-phosphate
  modified_base 13: mod_base = OTHER; note = 2'-O-methyladenosine-3'-phosphate
  modified_base 14: mod_base = OTHER; note = 2'-deoxy-2'-fluoroadenosine-3'-phosphate
  modified_base 15: mod_base = OTHER; note = 2'-O-methylcytidine-3'-phosphate
  modified_base 16: mod_base = OTHER; note = 2'-deoxy-2'-fluoroadenosine-3'-phosphate
  modified_base 17: mod_base = OTHER; note = 2'-O-methylcytidine-3'-phosphate
  modified_base 18: mod_base = OTHER; note = 2'-deoxy-2'-fluorouridine-3'-phosphate
  modified_base 19: mod_base = OTHER; note = 2'-O-methylguanosine-3'-phosphate
  modified_base 20: mod_base = OTHER; note = 2'-deoxy-2'-fluorouridine-3'-phosphate
  modified_base 21: mod_base = OTHER; note = 2'-O-methyluridine-3'-phosphorothioate
  modified_base 22: mod_base = OTHER; note = 2'-deoxy-2'-fluorouridine-3'-phosphorothioate
  modified_base 23: mod_base = OTHER; note = 2'-deoxy-2'-fluorouridine
ttatagagcaagaacactgtttt

SEQ ID NO: 822 - DNA, 23 bp, synthetic construct
  source 1..23: mol_type = other DNA
  modified_base 1: mod_base = OTHER; note = 2'-O-methyluridine-3'-phosphate
  modified_base 2: mod_base = OTHER; note = 2'-deoxy-2'-fluorouridine-3'-phosphate
  modified_base 3: mod_base = OTHER; note = 2'-O-methyladenosine-3'-phosphate
  modified_base 8: mod_base = OTHER; note = 2'-deoxy-2'-fluoroguanosine-3'-phosphate
  modified_base 9: mod_base = OTHER; note = 2'-O-methylcytidine-3'-phosphate
  modified_base 10: mod_base = OTHER; note = 2'-deoxy-2'-fluoroadenosine-3'-phosphate
  modified_base 11: mod_base = OTHER; note = 2'-O-methyladenosine-3'-phosphate
  modified_base 12: mod_base = OTHER; note = 2'-deoxy-2'-fluoroguanosine-3'-phosphate
  modified_base 13: mod_base = OTHER; note = 2'-O-methyladenosine-3'-phosphate
  modified_base 14: mod_base = OTHER; note = 2'-deoxy-2'-fluoroguanosine-3'-phosphate
  modified_base 15: mod_base = OTHER; note = 2'-O-methylcytidine-3'-phosphate
  modified_base 16: mod_base = OTHER; note = 2'-deoxy-2'-fluoroadenosine-3'-phosphate
  modified_base 17: mod_base = OTHER; note = 2'-O-methylcytidine-3'-phosphate
  modified_base 18: mod_base = OTHER; note = 2'-deoxy-2'-fluoroadenosine-3'-phosphate
  modified_base 19: mod_base = OTHER; note = 2'-O-methylguanosine-3'-phosphate
  modified_base 20: mod_base = OTHER; note = 2'-deoxy-2'-fluorouridine-3'-phosphate
  modified_base 21: mod_base = OTHER; note = 2'-O-methyluridine-3'-phosphorothioate
  modified_base 22: mod_base = OTHER; note = 2'-deoxy-2'-fluorouridine-3'-phosphorothioate
  modified_base 23: mod_base = OTHER; note = 2'-O-methyluridine
  misc_feature 1..3: note = RNA
  misc_feature 8..23: note = RNA
  misc_feature 4..7: note = DNA
ttatagagcaagagcacagtttt

SEQ ID NO: 823 - RNA, 23 nt, synthetic construct
  source 1..23: mol_type = other RNA
  modified_base 1: mod_base = OTHER; note = 2'-O-methyluridine-3'-phosphate
  modified_base 2: mod_base = OTHER; note = 2'-deoxy-2'-fluorouridine-3'-phosphate
  modified_base 3: mod_base = OTHER; note = 2'-deoxy-2'-fluoroadenosine-3'-phosphate
  modified_base 4: mod_base = OTHER; note = 2'-deoxy-2'-fluorouridine-3'-phosphate
  modified_base 5: mod_base = OTHER; note = 2'-O-methyladenosine-3'-phosphate
  modified_base 6: mod_base = OTHER; note = 2'-deoxy-2'-fluoroguanosine-3'-phosphate
  modified_base 7: mod_base = OTHER; note = 2'-deoxy-2'-fluoroadenosine-3'-phosphate
  modified_base 8: mod_base = OTHER; note = 2'-deoxy-2'-fluoroguanosine-3'-phosphate
  modified_base 9: mod_base = OTHER; note = 2'-O-methylcytidine-3'-phosphate
  modified_base 10: mod_base = OTHER; note = 2'-deoxy-2'-fluoroadenosine-3'-phosphate
  modified_base 11: mod_base = OTHER; note = 2'-deoxy-2'-fluoroadenosine-3'-phosphate
  modified_base 12: mod_base = OTHER; note = 2'-deoxy-2'-fluoroguanosine-3'-phosphate
  modified_base 13: mod_base = OTHER; note = 2'-O-methyladenosine-3'-phosphate
  modified_base 14: mod_base = OTHER; note = 2'-deoxy-2'-fluoroadenosine-3'-phosphate
  modified_base 15: mod_base = OTHER; note = 2'-deoxy-2'-fluorocytidine-3'-phosphate
  modified_base 16: mod_base = OTHER; note = 2'-deoxy-2'-fluoroadenosine-3'-phosphate
  modified_base 17: mod_base = OTHER; note = 2'-O-methylcytidine-3'-phosphate
  modified_base 18: mod_base = OTHER; note = 2'-deoxy-2'-fluorouridine-3'-phosphate
  modified_base 19: mod_base = OTHER; note = 2'-deoxy-2'-fluoroguanosine-3'-phosphate
  modified_base 20: mod_base = OTHER; note = 2'-deoxy-2'-fluorouridine-3'-phosphate
  modified_base 21: mod_base = OTHER; note = 2'-O-methyluridine-3'-phosphorothioate
  modified_base 22: mod_base = OTHER; note = 2'-deoxy-2'-fluorouridine-3'-phosphorothioate
  modified_base 23: mod_base = OTHER; note = 2'-O-methyluridine
ttatagagcaagaacactgtttt

SEQ ID NO: 824 - DNA, 23 bp, synthetic construct
  source 1..23: mol_type = other DNA
  modified_base 1: mod_base = OTHER; note = 2'-O-methyluridine-3'-phosphate
  modified_base 5: mod_base = OTHER; note = 2'-O-methyladenosine-3'-phosphate
  modified_base 9: mod_base = OTHER; note = 2'-O-methylcytidine-3'-phosphate
  modified_base 13: mod_base = OTHER; note = 2'-O-methyladenosine-3'-phosphate
  modified_base 17: mod_base = OTHER; note = 2'-O-methylcytidine-3'-phosphate
  modified_base 21: mod_base = OTHER; note = 2'-O-methyluridine-3'-phosphorothioate
  modified_base 22: mod_base = OTHER; note = 2'-deoxythymidine-3'-phosphorothioate
  modified_base 23: mod_base = OTHER; note = 2'-O-methyluridine
  misc_feature 1: note = RNA
  misc_feature 5: note = RNA
  misc_feature 9: note = RNA
  misc_feature 13: note = RNA
  misc_feature 17: note = RNA
  misc_feature 21: note = RNA
  misc_feature 23: note = RNA
  misc_feature 2..4: note = DNA
  misc_feature 6..8: note = DNA
  misc_feature 10..12: note = DNA
  misc_feature 14..16: note = DNA
  misc_feature 18..20: note = DNA
  misc_feature 22: note = DNA
ttatagagcaagaacactgtttt

SEQ ID NO: 825 - DNA, 23 bp, synthetic construct
  source 1..23: mol_type = other DNA
  modified_base 1: mod_base = OTHER; note = 2'-O-methyluridine-3'-phosphate
  modified_base 2: mod_base = OTHER; note = 2'-deoxy-2'-fluorouridine-3'-phosphate
  modified_base 3: mod_base = OTHER; note = 2'-O-methyladenosine-3'-phosphate
  modified_base 4: mod_base = OTHER; note = 2'-deoxy-2'-fluorouridine-3'-phosphate
  modified_base 9: mod_base = OTHER; note = 2'-O-methylcytidine-3'-phosphate
  modified_base 10: mod_base = OTHER; note = 2'-deoxy-2'-fluoroadenosine-3'-phosphate
  modified_base 11: mod_base = OTHER; note = 2'-O-methyladenosine-3'-phosphate
  modified_base 12: mod_base = OTHER; note = 2'-deoxy-2'-fluoroguanosine-3'-phosphate
  modified_base 13: mod_base = OTHER; note = 2'-O-methyladenosine-3'-phosphate
  modified_base 14: mod_base = OTHER; note = 2'-deoxy-2'-fluoroguanosine-3'-phosphate
  modified_base 15: mod_base = OTHER; note = 2'-O-methylcytidine-3'-phosphate
  modified_base 16: mod_base = OTHER; note = 2'-deoxy-2'-fluoroadenosine-3'-phosphate
  modified_base 17: mod_base = OTHER; note = 2'-O-methylcytidine-3'-phosphate
  modified_base 18: mod_base = OTHER; note = 2'-deoxy-2'-fluoroadenosine-3'-phosphate
  modified_base 19: mod_base = OTHER; note = 2'-O-methylguanosine-3'-phosphate
  modified_base 20: mod_base = OTHER; note = 2'-deoxy-2'-fluorouridine-3'-phosphate
  modified_base 21: mod_base = OTHER; note = 2'-O-methyluridine-3'-phosphorothioate
  modified_base 22: mod_base = OTHER; note = 2'-deoxy-2'-fluorouridine-3'-phosphorothioate
  modified_base 23: mod_base = OTHER; note = 2'-O-methyluridine
  misc_feature 1..4: note = RNA
  misc_feature 9..23: note = RNA
  misc_feature 5..8: note = DNA
ttatagagcaagagcacagtttt

SEQ ID NO: 826 - DNA, 23 bp, synthetic construct
  source 1..23: mol_type = other DNA
  modified_base 1: mod_base = OTHER; note = 2'-O-methyluridine-3'-phosphate
  modified_base 2: mod_base = OTHER; note = 2'-deoxy-2'-fluorouridine-3'-phosphate
  modified_base 3: mod_base = OTHER; note = 2'-O-methyladenosine-3'-phosphate
  modified_base 4: mod_base = OTHER; note = 2'-deoxy-2'-fluorouridine-3'-phosphate
  modified_base 5: mod_base = OTHER; note = 2'-O-methyladenosine-3'-phosphate
  modified_base 10: mod_base = OTHER; note = 2'-deoxy-2'-fluoroadenosine-3'-phosphate
  modified_base 11: mod_base = OTHER; note = 2'-O-methyladenosine-3'-phosphate
  modified_base 12: mod_base = OTHER; note = 2'-deoxy-2'-fluoroguanosine-3'-phosphate
  modified_base 13: mod_base = OTHER; note = 2'-O-methyladenosine-3'-phosphate
  modified_base 14: mod_base = OTHER; note = 2'-deoxy-2'-fluoroguanosine-3'-phosphate
  modified_base 15: mod_base = OTHER; note = 2'-O-methylcytidine-3'-phosphate
  modified_base 16: mod_base = OTHER; note = 2'-deoxy-2'-fluoroadenosine-3'-phosphate
  modified_base 17: mod_base = OTHER; note = 2'-O-methylcytidine-3'-phosphate
  modified_base 18: mod_base = OTHER; note = 2'-deoxy-2'-fluoroadenosine-3'-phosphate
  modified_base 19: mod_base = OTHER; note = 2'-O-methylguanosine-3'-phosphate
  modified_base 20: mod_base = OTHER; note = 2'-deoxy-2'-fluorouridine-3'-phosphate
  modified_base 21: mod_base = OTHER; note = 2'-O-methyluridine-3'-phosphorothioate
  modified_base 22: mod_base = OTHER; note = 2'-deoxy-2'-fluorouridine-3'-phosphorothioate
  modified_base 23: mod_base = OTHER; note = 2'-O-methyluridine
  misc_feature 1..5: note = RNA
  misc_feature 10..23: note = RNA
  misc_feature 6..9: note = DNA
ttatagagcaagagcacagtttt

SEQ ID NO: 827 - RNA, 23 nt, synthetic construct
  source 1..23: mol_type = other RNA
  modified_base 1: mod_base = OTHER; note = 2'-O-methyluridine-3'-phosphate
  modified_base 2: mod_base = OTHER; note = 2'-deoxy-2'-fluorouridine-3'-phosphate
  modified_base 3: mod_base = OTHER; note = 2'-O-methyladenosine-3'-phosphate
  modified_base 4: mod_base = OTHER; note = 2'-deoxy-2'-fluorouridine-3'-phosphate
  modified_base 5: mod_base = OTHER; note = 2'-deoxy-2'-fluoroadenosine-3'-phosphate
  modified_base 6: mod_base = OTHER; note = 2'-O-methylguanosine-3'-phosphate
  modified_base 7: mod_base = OTHER; note = 2'-O-methyladenosine-3'-phosphate
  modified_base 8: mod_base = OTHER; note = 2'-deoxy-2'-fluoroguanosine-3'-phosphate
  modified_base 9: mod_base = OTHER; note = 2'-deoxy-2'-fluorocytidine-3'-phosphate
  modified_base 10: mod_base = OTHER; note = 2'-O-methyladenosine-3'-phosphate
  modified_base 11: mod_base = OTHER; note = 2'-O-methyladenosine-3'-phosphate
  modified_base 12: mod_base = OTHER; note = 2'-deoxy-2'-fluoroguanosine-3'-phosphate
  modified_base 13: mod_base = OTHER; note = 2'-deoxy-2'-fluoroadenosine-3'-phosphate
  modified_base 14: mod_base = OTHER; note = 2'-O-methyladenosine-3'-phosphate
  modified_base 15: mod_base = OTHER; note = 2'-O-methylcytidine-3'-phosphate
  modified_base 16: mod_base = OTHER; note = 2'-deoxy-2'-fluoroadenosine-3'-phosphate
  modified_base 17: mod_base = OTHER; note = 2'-deoxy-2'-fluorocytidine-3'-phosphate
  modified_base 18: mod_base = OTHER; note = 2'-O-methyluridine-3'-phosphate
  modified_base 19: mod_base = OTHER; note = 2'-O-methylguanosine-3'-phosphate
  modified_base 20: mod_base = OTHER; note = 2'-deoxy-2'-fluorouridine-3'-phosphate
  modified_base 21: mod_base = OTHER; note = 2'-deoxy-2'-fluorouridine-3'-phosphorothioate
  modified_base 22: mod_base = OTHER; note = 2'-O-methyluridine-3'-phosphorothioate
  modified_base 23: mod_base = OTHER; note = 2'-O-methyluridine
ttatagagcaagaacactgtttt

SEQ ID NO: 828 - DNA, 23 bp, synthetic construct
  source 1..23: mol_type = other DNA
  modified_base 1: mod_base = OTHER; note = 2'-O-methyluridine-3'-phosphate
  modified_base 4: mod_base = OTHER; note = 2'-deoxy-2'-fluorouridine-3'-phosphate
  modified_base 5: mod_base = OTHER; note = 2'-O-methyladenosine-3'-phosphate
  modified_base 8: mod_base = OTHER; note = 2'-deoxy-2'-fluoroguanosine-3'-phosphate
  modified_base 9: mod_base = OTHER; note = 2'-O-methylcytidine-3'-phosphate
  modified_base 10: mod_base = OTHER; note = 2'-deoxy-2'-fluoroadenosine-3'-phosphate
  modified_base 11: mod_base = OTHER; note = 2'-O-methyladenosine-3'-phosphate
  modified_base 12: mod_base = OTHER; note = 2'-deoxy-2'-fluoroguanosine-3'-phosphate
  modified_base 13: mod_base = OTHER; note = 2'-O-methyladenosine-3'-phosphate
  modified_base 14: mod_base = OTHER; note = 2'-deoxy-2'-fluoroguanosine-3'-phosphate
  modified_base 15: mod_base = OTHER; note = 2'-O-methylcytidine-3'-phosphate
  modified_base 16: mod_base = OTHER; note = 2'-deoxy-2'-fluoroadenosine-3'-phosphate
  modified_base 17: mod_base = OTHER; note = 2'-O-methylcytidine-3'-phosphate
  modified_base 18: mod_base = OTHER; note = 2'-deoxy-2'-fluoroadenosine-3'-phosphate
  modified_base 19: mod_base = OTHER; note = 2'-O-methylguanosine-3'-phosphate
  modified_base 20: mod_base = OTHER; note = 2'-deoxy-2'-fluorouridine-3'-phosphate
  modified_base 21: mod_base = OTHER; note = 2'-O-methyluridine-3'-phosphorothioate
  modified_base 22: mod_base = OTHER; note = 2'-deoxy-2'-fluorouridine-3'-phosphorothioate
  modified_base 23: mod_base = OTHER; note = 2'-O-methyluridine
  misc_feature 1: note = RNA
  misc_feature 4..5: note = RNA
  misc_feature 8..23: note = RNA
  misc_feature 2..3: note = DNA
  misc_feature 6..7: note = DNA
ttatagagcaagagcacagtttt

SEQ ID NO: 829 - RNA, 23 nt, synthetic construct
  source 1..23: mol_type = other RNA
  modified_base 1: mod_base = OTHER; note = 2'-O-methyluridine-3'-phosphate
  modified_base 3: mod_base = OTHER; note = 2'-O-methyladenosine-3'-phosphate
  modified_base 6: mod_base = OTHER; note = 2'-O-methylguanosine-3'-phosphate
  modified_base 10: mod_base = OTHER; note = 2'-O-methyladenosine-3'-phosphate
  modified_base 14: mod_base = OTHER; note = 2'-O-methyladenosine-3'-phosphate
  modified_base 18: mod_base = OTHER; note = 2'-O-methyluridine-3'-phosphate
  modified_base 21: mod_base = OTHER; note = uridine-3'-phosphorothioate
  modified_base 22: mod_base = OTHER; note = 2'-O-methyluridine-3'-phosphorothioate
  modified_base 23: mod_base = OTHER; note = 2'-O-methyluridine
ttatagagcaagaacactgtttt

SEQ ID NO: 830 - RNA, 23 nt, synthetic construct
  source 1..23: mol_type = other RNA
  modified_base 1: mod_base = OTHER; note = 2'-O-methyluridine-3'-phosphate
  modified_base 5: mod_base = OTHER; note = 2'-O-methyladenosine-3'-phosphate
  modified_base 9: mod_base = OTHER; note = 2'-O-methylcytidine-3'-phosphate
  modified_base 13: mod_base = OTHER; note = 2'-O-methyladenosine-3'-phosphate
  modified_base 17: mod_base = OTHER; note = 2'-O-methylcytidine-3'-phosphate
  modified_base 21: mod_base = OTHER; note = 2'-O-methyluridine-3'-phosphorothioate
  modified_base 22: mod_base = OTHER; note = uridine-3'-phosphorothioate
  modified_base 23: mod_base = OTHER; note = 2'-O-methyluridine
ttatagagcaagaacactgtttt

SEQ ID NO: 831 - DNA, 23 bp, synthetic construct
  source 1..23: mol_type = other DNA
  modified_base 1: mod_base = OTHER; note = 2'-O-methyluridine-3'-phosphate
  modified_base 4: mod_base = OTHER; note = 2'-deoxy-2'-fluorouridine-3'-phosphate
  modified_base 5: mod_base = OTHER; note = 2'-O-methyladenosine-3'-phosphate
  modified_base 6: mod_base = OTHER; note = 2'-deoxy-2'-fluoroguanosine-3'-phosphate
  modified_base 7: mod_base = OTHER; note = 2'-O-methyladenosine-3'-phosphate
  modified_base 10: mod_base = OTHER; note = 2'-deoxy-2'-fluoroadenosine-3'-phosphate
  modified_base 11: mod_base = OTHER; note = 2'-O-methyladenosine-3'-phosphate
  modified_base 12: mod_base = OTHER; note = 2'-deoxy-2'-fluoroguanosine-3'-phosphate
  modified_base 13: mod_base = OTHER; note = 2'-O-methyladenosine-3'-phosphate
  modified_base 14: mod_base = OTHER; note = 2'-deoxy-2'-fluoroguanosine-3'-phosphate
  modified_base 15: mod_base = OTHER; note = 2'-O-methylcytidine-3'-phosphate
  modified_base 16: mod_base = OTHER; note = 2'-deoxy-2'-fluoroadenosine-3'-phosphate
  modified_base 17: mod_base = OTHER; note = 2'-O-methylcytidine-3'-phosphate
  modified_base 18: mod_base = OTHER; note = 2'-deoxy-2'-fluoroadenosine-3'-phosphate
  modified_base 19: mod_base = OTHER; note = 2'-O-methylguanosine-3'-phosphate
  modified_base 20: mod_base = OTHER; note = 2'-deoxy-2'-fluorouridine-3'-phosphate
  modified_base 21: mod_base = OTHER; note = 2'-O-methyluridine-3'-phosphorothioate
  modified_base 22: mod_base = OTHER; note = 2'-deoxy-2'-fluorouridine-3'-phosphorothioate
  modified_base 23: mod_base = OTHER; note = 2'-O-methyluridine
  misc_feature 1: note = RNA
  misc_feature 4..7: note = RNA
  misc_feature 10..23: note = RNA
  misc_feature 2..3: note = DNA
  misc_feature 8..9: note = DNA
ttatagagcaagagcacagtttt

SEQ ID NO: 832 - RNA, 23 nt, synthetic construct
  source 1..23: mol_type = other RNA
  modified_base 3: mod_base = OTHER; note = 2'-O-methyladenosine-3'-phosphate
  modified_base 4: mod_base = OTHER; note = 2'-O-methyluridine-3'-phosphate
  modified_base 7: mod_base = OTHER; note = 2'-O-methyladenosine-3'-phosphate
  modified_base 8: mod_base = OTHER; note = 2'-O-methylguanosine-3'-phosphate
  modified_base 11: mod_base = OTHER; note = 2'-O-methyladenosine-3'-phosphate
  modified_base 12: mod_base = OTHER; note = 2'-O-methylguanosine-3'-phosphate
  modified_base 15: mod_base = OTHER; note = 2'-O-methylcytidine-3'-phosphate
  modified_base 16: mod_base = OTHER; note = 2'-O-methyladenosine-3'-phosphate
  modified_base 19: mod_base = OTHER; note = 2'-O-methylguanosine-3'-phosphate
  modified_base 20: mod_base = OTHER; note = 2'-O-methyluridine-3'-phosphate
  modified_base 21: mod_base = OTHER; note = uridine-3'-phosphorothioate
  modified_base 22: mod_base = OTHER; note = uridine-3'-phosphorothioate
  modified_base 23: mod_base = OTHER; note = 2'-O-methyluridine
ttatagagcaagaacactgtttt

SEQ ID NO: 833 - DNA, 23 bp, synthetic construct
  source 1..23: mol_type = other DNA
  modified_base 1: mod_base = OTHER; note = 2'-O-methyluridine-3'-phosphate
  modified_base 6: mod_base = OTHER; note = 2'-deoxy-2'-fluoroguanosine-3'-phosphate
  modified_base 7: mod_base = OTHER; note = 2'-O-methyladenosine-3'-phosphate
  modified_base 8: mod_base = OTHER; note = 2'-deoxy-2'-fluoroguanosine-3'-phosphate
  modified_base 9: mod_base = OTHER; note = 2'-O-methylcytidine-3'-phosphate
  modified_base 10: mod_base = OTHER; note = 2'-deoxy-2'-fluoroadenosine-3'-phosphate
  modified_base 11: mod_base = OTHER; note = 2'-O-methyladenosine-3'-phosphate
  modified_base 12: mod_base = OTHER; note = 2'-deoxy-2'-fluoroguanosine-3'-phosphate
  modified_base 13: mod_base = OTHER; note = 2'-O-methyladenosine-3'-phosphate
  modified_base 14: mod_base = OTHER; note = 2'-deoxy-2'-fluoroadenosine-3'-phosphate
  modified_base 15: mod_base = OTHER; note = 2'-O-methylcytidine-3'-phosphate
  modified_base 16: mod_base = OTHER; note = 2'-deoxy-2'-fluoroadenosine-3'-phosphate
  modified_base 17: mod_base = OTHER; note = 2'-O-methylcytidine-3'-phosphate
  modified_base 18: mod_base = OTHER; note = 2'-deoxy-2'-fluoroadenosine-3'-phosphate
  modified_base 19: mod_base = OTHER; note = 2'-O-methylguanosine-3'-phosphate
  modified_base 20: mod_base = OTHER; note = 2'-deoxy-2'-fluorouridine-3'-phosphate
  modified_base 21: mod_base = OTHER; note = 2'-O-methyluridine-3'-phosphorothioate
  modified_base 22: mod_base = OTHER; note = 2'-deoxy-2'-fluorouridine-3'-phosphorothioate
  modified_base 23: mod_base = OTHER; note = 2'-O-methyluridine
  misc_feature 1: note = RNA
  misc_feature 6..23: note = RNA
  misc_feature 2..5: note = DNA
ttatagagcaagaacacagtttt

SEQ ID NO: 834 - RNA, 23 nt, synthetic construct
  source 1..23: mol_type = other RNA
  modified_base 1: mod_base = OTHER; note = 2'-O-methyluridine-3'-phosphate
  modified_base 3: mod_base = OTHER; note = 2'-O-methyladenosine-3'-phosphate
  modified_base 6: mod_base = OTHER; note = 2'-O-methylguanosine-3'-phosphate
  modified_base 7: mod_base = OTHER; note = 2'-O-methyladenosine-3'-phosphate
  modified_base 10: mod_base = OTHER; note = 2'-O-methyladenosine-3'-phosphate
  modified_base 11: mod_base = OTHER; note = 2'-O-methyladenosine-3'-phosphate
  modified_base 14: mod_base = OTHER; note = 2'-O-methyladenosine-3'-phosphate
  modified_base 15: mod_base = OTHER; note = 2'-O-methylcytidine-3'-phosphate
  modified_base 18: mod_base = OTHER; note = 2'-O-methyluridine-3'-phosphate
  modified_base 19: mod_base = OTHER; note = 2'-O-methylguanosine-3'-phosphate
  modified_base 21: mod_base = OTHER; note = uridine-3'-phosphorothioate
  modified_base 22: mod_base = OTHER; note = 2'-O-methyluridine-3'-phosphorothioate
  modified_base 23: mod_base = OTHER; note = 2'-O-methyluridine
ttatagagcaagaacactgtttt

SEQ ID NO: 835 - DNA, 23 bp, synthetic construct
  source 1..23: mol_type = other DNA
  modified_base 1: mod_base = OTHER; note = 2'-O-methyluridine-3'-phosphate
  modified_base 7: mod_base = OTHER; note = 2'-O-methyladenosine-3'-phosphate
  modified_base 8: mod_base = OTHER; note = 2'-deoxy-2'-fluoroguanosine-3'-phosphate
  modified_base 9: mod_base = OTHER; note = 2'-O-methylcytidine-3'-phosphate
  modified_base 10: mod_base = OTHER; note = 2'-deoxy-2'-fluoroadenosine-3'-phosphate
  modified_base 11: mod_base = OTHER; note = 2'-O-methyladenosine-3'-phosphate
  modified_base 12: mod_base = OTHER; note = 2'-deoxy-2'-fluoroguanosine-3'-phosphate
  modified_base 13: mod_base = OTHER; note = 2'-O-methyladenosine-3'-phosphate
  modified_base 14: mod_base = OTHER; note = 2'-deoxy-2'-fluoroguanosine-3'-phosphate
  modified_base 15: mod_base = OTHER; note = 2'-O-methylcytidine-3'-phosphate
  modified_base 16: mod_base = OTHER; note = 2'-deoxy-2'-fluoroadenosine-3'-phosphate
  modified_base 17: mod_base = OTHER; note = 2'-O-methylcytidine-3'-phosphate
  modified_base 18: mod_base = OTHER; note = 2'-deoxy-2'-fluoroadenosine-3'-phosphate
  modified_base 19: mod_base = OTHER; note = 2'-O-methylguanosine-3'-phosphate
  modified_base 20: mod_base = OTHER; note = 2'-deoxy-2'-fluorouridine-3'-phosphate
  modified_base 21: mod_base = OTHER; note = 2'-O-methyluridine-3'-phosphorothioate
  modified_base 22: mod_base = OTHER; note = 2'-deoxy-2'-fluorouridine-3'-phosphorothioate
  modified_base 23: mod_base = OTHER; note = 2'-O-methyluridine
  misc_feature 1: note = RNA
  misc_feature 7..23: note = RNA
  misc_feature 2..6: note = DNA
ttatagagcaagagcacagtttt

SEQ ID NO: 836 - RNA, 23 nt, synthetic construct
  source 1..23: mol_type = other RNA
  modified_base 1: mod_base = OTHER; note = 2'-O-methyluridine-3'-phosphate
  modified_base 2: mod_base = OTHER; note = 2'-deoxy-2'-fluorouridine-3'-phosphate
  modified_base 3: mod_base = OTHER; note = 2'-O-methyladenosine-3'-phosphate
  modified_base 4: mod_base = OTHER; note = 2'-deoxy-2'-fluorouridine-3'-phosphate
  modified_base 5: mod_base = OTHER; note = 2'-deoxy-2'-fluoroadenosine-3'-phosphate
  modified_base 6: mod_base = OTHER; note = 2'-O-methylguanosine-3'-phosphate
  modified_base 7: mod_base = OTHER; note = 2'-deoxy-2'-fluoroadenosine-3'-phosphate
  modified_base 8: mod_base = OTHER; note = 2'-deoxy-2'-fluoroguanosine-3'-phosphate
  modified_base 9: mod_base = OTHER; note = 2'-deoxy-2'-fluorocytidine-3'-phosphate
  modified_base 10: mod_base = OTHER; note = 2'-O-methyladenosine-3'-phosphate
  modified_base 11: mod_base = OTHER; note = 2'-deoxy-2'-fluoroadenosine-3'-phosphate
  modified_base 12: mod_base = OTHER; note = 2'-deoxy-2'-fluoroguanosine-3'-phosphate
  modified_base 13: mod_base = OTHER; note = 2'-deoxy-2'-fluoroadenosine-3'-phosphate
  modified_base 14: mod_base = OTHER; note = 2'-O-methyladenosine-3'-phosphate
  modified_base 15: mod_base = OTHER; note = 2'-deoxy-2'-fluorocytidine-3'-phosphate
  modified_base 16: mod_base = OTHER; note = 2'-deoxy-2'-fluoroadenosine-3'-phosphate
  modified_base 17: mod_base = OTHER; note = 2'-deoxy-2'-fluorocytidine-3'-phosphate
  modified_base 18: mod_base = OTHER; note = 2'-O-methyluridine-3'-phosphate
  modified_base 19: mod_base = OTHER; note = 2'-deoxy-2'-fluoroguanosine-3'-phosphate
  modified_base 20: mod_base = OTHER; note = 2'-deoxy-2'-fluorouridine-3'-phosphate
  modified_base 21: mod_base = OTHER; note = 2'-deoxy-2'-fluorouridine-3'-phosphorothioate
  modified_base 22: mod_base = OTHER; note = 2'-O-methyluridine-3'-phosphorothioate
  modified_base 23: mod_base = OTHER; note = 2'-O-methyluridine
ttatagagcaagaacactgtttt

SEQ ID NO: 837 - DNA, 23 bp, synthetic construct
  source 1..23: mol_type = other DNA
  modified_base 1: mod_base = OTHER; note = 2'-O-methyluridine-3'-phosphate
  modified_base 3: mod_base = OTHER; note = 2'-O-methyladenosine-3'-phosphate
  modified_base 6: mod_base = OTHER; note = 2'-O-methylguanosine-3'-phosphate
  modified_base 10: mod_base = OTHER; note = 2'-O-methyladenosine-3'-phosphate
  modified_base 14: mod_base = OTHER; note = 2'-O-methyladenosine-3'-phosphate
  modified_base 18: mod_base = OTHER; note = 2'-O-methyluridine-3'-phosphate
  modified_base 21: mod_base = OTHER; note = 2'-deoxythymidine-3'-phosphorothioate
  modified_base 22: mod_base = OTHER; note = 2'-O-methyluridine-3'-phosphorothioate
  modified_base 23: mod_base = OTHER; note = 2'-O-methyluridine
  misc_feature 1: note = RNA
  misc_feature 3: note = RNA
  misc_feature 6: note = RNA
  misc_feature 10: note = RNA
  misc_feature 14: note = RNA
  misc_feature 18: note = RNA
  misc_feature 22..23: note = RNA
  misc_feature 2: note = DNA
  misc_feature 4..5: note = DNA
  misc_feature 7..9: note = DNA
  misc_feature 11..13: note = DNA
  misc_feature 15..17: note = DNA
  misc_feature 19..21: note = DNA
ttatagagcaagaacactgtttt

SEQ ID NO: 838 - RNA, 23 nt, synthetic construct
  source 1..23: mol_type = other RNA
  modified_base 1: mod_base = OTHER; note = 2'-deoxy-2'-fluorouridine-3'-phosphate
  modified_base 2: mod_base = OTHER; note = 2'-deoxy-2'-fluorouridine-3'-phosphate
  modified_base 3: mod_base = OTHER; note = 2'-O-methyladenosine-3'-phosphate
  modified_base 4: mod_base = OTHER; note = 2'-deoxy-2'-fluorouridine-3'-phosphate
  modified_base 5: mod_base = OTHER; note = 2'-O-methyladenosine-3'-phosphate
  modified_base 6: mod_base = OTHER; note = 2'-deoxy-2'-fluoroguanosine-3'-phosphate
  modified_base 7: mod_base = OTHER; note = 2'-O-methyladenosine-3'-phosphate
  modified_base 8: mod_base = OTHER; note = 2'-deoxy-2'-fluoroguanosine-3'-phosphate
  modified_base 9: mod_base = OTHER; note = 2'-O-methylcytidine-3'-phosphate
  modified_base 10: mod_base = OTHER; note = 2'-deoxy-2'-fluoroadenosine-3'-phosphate
  modified_base 11: mod_base = OTHER; note = 2'-O-methyladenosine-3'-phosphate
  modified_base 12: mod_base = OTHER; note = 2'-deoxy-2'-fluoroguanosine-3'-phosphate
  modified_base 13: mod_base = OTHER; note = 2'-O-methyladenosine-3'-phosphate
  modified_base 14: mod_base = OTHER; note = 2'-deoxy-2'-fluoroadenosine-3'-phosphate
  modified_base 15: mod_base = OTHER; note = 2'-O-methylcytidine-3'-phosphate
  modified_base 16: mod_base = OTHER; note = 2'-deoxy-2'-fluoroadenosine-3'-phosphate
  modified_base 17: mod_base = OTHER; note = 2'-O-methylcytidine-3'-phosphate
  modified_base 18: mod_base = OTHER; note = 2'-deoxy-2'-fluorouridine-3'-phosphate
  modified_base 19: mod_base = OTHER; note = 2'-O-methylguanosine-3'-phosphate
  modified_base 20: mod_base = OTHER; note = 2'-deoxy-2'-fluorouridine-3'-phosphate
  modified_base 21: mod_base = OTHER; note = 2'-O-methyluridine-3'-phosphorothioate
  modified_base 22: mod_base = OTHER; note = 2'-deoxy-2'-fluorouridine-3'-phosphorothioate
  modified_base 23: mod_base = OTHER; note = 2'-O-methyluridine
ttatagagcaagaacactgtttt

SEQ ID NO: 839 - RNA, 23 nt, synthetic construct
  source 1..23: mol_type = other RNA
  modified_base 1: mod_base = OTHER; note = 2'-deoxy-2'-fluorouridine-3'-phosphate
  modified_base 2: mod_base = OTHER; note = 2'-deoxy-2'-fluorouridine-3'-phosphate
  modified_base 3: mod_base = OTHER; note = 2'-O-methyladenosine-3'-phosphate
  modified_base 4: mod_base = OTHER; note = 2'-deoxy-2'-fluorouridine-3'-phosphate
  modified_base 5: mod_base = OTHER; note = 2'-O-methyladenosine-3'-phosphate
  modified_base 6: mod_base = OTHER; note = 2'-deoxy-2'-fluoroguanosine-3'-phosphate
  modified_base 7: mod_base = OTHER; note = 2'-O-methyladenosine-3'-phosphate
  modified_base 8: mod_base = OTHER; note = 2'-deoxy-2'-fluoroguanosine-3'-phosphate
  modified_base 9: mod_base = OTHER; note = 2'-O-methylcytidine-3'-phosphate
  modified_base 10: mod_base = OTHER; note = 2'-deoxy-2'-fluoroadenosine-3'-phosphate
  modified_base 11: mod_base = OTHER; note = 2'-O-methyladenosine-3'-phosphate
  modified_base 12: mod_base = OTHER; note = 2'-deoxy-2'-fluoroguanosine-3'-phosphate
  modified_base 13: mod_base = OTHER; note = 2'-O-methyladenosine-3'-phosphate
  modified_base 14: mod_base = OTHER; note = 2'-O-methyladenosine-3'-phosphate
  modified_base 15: mod_base = OTHER; note = 2'-O-methylcytidine-3'-phosphate
  modified_base 16: mod_base = OTHER; note = 2'-deoxy-2'-fluoroadenosine-3'-phosphate
  modified_base 17: mod_base = OTHER; note = 2'-O-methylcytidine-3'-phosphate
  modified_base 18: mod_base = OTHER; note = 2'-deoxy-2'-fluorouridine-3'-phosphate
  modified_base 19: mod_base = OTHER; note = 2'-O-methylguanosine-3'-phosphate
  modified_base 20: mod_base = OTHER; note = 2'-deoxy-2'-fluorouridine-3'-phosphate
  modified_base 21: mod_base = OTHER; note = 2'-O-methyluridine-3'-phosphorothioate
  modified_base 22: mod_base = OTHER; note = 2'-deoxy-2'-fluorouridine-3'-phosphorothioate
  modified_base 23: mod_base = OTHER; note = 2'-O-methyluridine
ttatagagcaagaacactgtttt

SEQ ID NO: 840 - RNA, 23 nt, synthetic construct
  source 1..23: mol_type = other RNA
  modified_base 1: mod_base = OTHER; note = 2'-deoxy-2'-fluorouridine-3'-phosphate
  modified_base 2: mod_base = OTHER; note = 2'-deoxy-2'-fluorouridine-3'-phosphate
  modified_base 3: mod_base = OTHER; note = 2'-O-methyladenosine-3'-phosphate
  modified_base 4: mod_base = OTHER; note = 2'-deoxy-2'-fluorouridine-3'-phosphate
  modified_base 5: mod_base = OTHER; note = 2'-O-methyladenosine-3'-phosphate
  modified_base 6: mod_base = OTHER; note = 2'-deoxy-2'-fluoroguanosine-3'-phosphate
  modified_base 7: mod_base = OTHER; note = 2'-O-methyladenosine-3'-phosphate
  modified_base 8: mod_base = OTHER; note = 2'-O-methylguanosine-3'-phosphate
  modified_base 9: mod_base = OTHER; note = 2'-O-methylcytidine-3'-phosphate
  modified_base 10: mod_base = OTHER; note = 2'-deoxy-2'-fluoroadenosine-3'-phosphate
  modified_base 11: mod_base = OTHER; note = 2'-O-methyladenosine-3'-phosphate
  modified_base 12: mod_base = OTHER; note = 2'-deoxy-2'-fluoroguanosine-3'-phosphate
  modified_base 13: mod_base = OTHER; note = 2'-O-methyladenosine-3'-phosphate
  modified_base 14: mod_base = OTHER; note = 2'-deoxy-2'-fluoroadenosine-3'-phosphate
  modified_base 15: mod_base = OTHER; note = 2'-O-methylcytidine-3'-phosphate
  modified_base 16: mod_base = OTHER; note = 2'-deoxy-2'-fluoroadenosine-3'-phosphate
  modified_base 17: mod_base = OTHER; note = 2'-O-methylcytidine-3'-phosphate
  modified_base 18: mod_base = OTHER; note = 2'-deoxy-2'-fluorouridine-3'-phosphate
  modified_base 19: mod_base = OTHER; note = 2'-O-methylguanosine-3'-phosphate
  modified_base 20: mod_base = OTHER; note = 2'-deoxy-2'-fluorouridine-3'-phosphate
  modified_base 21: mod_base = OTHER; note = 2'-O-methyluridine-3'-phosphorothioate
  modified_base 22: mod_base = OTHER; note = 2'-deoxy-2'-fluorouridine-3'-phosphorothioate
  modified_base 23: mod_base = OTHER; note = 2'-O-methyluridine
ttatagagcaagaacactgtttt

SEQ ID NO: 841 - RNA, 23 nt, synthetic construct
  source 1..23: mol_type = other RNA
  modified_base 1: mod_base = OTHER; note = 2'-deoxy-2'-fluorouridine-3'-phosphate
  modified_base 2: mod_base = OTHER; note = 2'-deoxy-2'-fluorouridine-3'-phosphate
  modified_base 3: mod_base = OTHER; note = 2'-deoxy-2'-fluoroadenosine-3'-phosphate
  modified_base 4: mod_base = OTHER; note = 2'-deoxy-2'-fluorouridine-3'-phosphate
  modified_base 5: mod_base = OTHER; note = 2'-deoxy-2'-fluoroadenosine-3'-phosphate
  modified_base 6: mod_base = OTHER; note = 2'-deoxy-2'-fluoroguanosine-3'-phosphate
  modified_base 7: mod_base = OTHER; note = 2'-deoxy-2'-fluoroadenosine-3'-phosphate
  modified_base 8: mod_base = OTHER; note = 2'-deoxy-2'-fluoroguanosine-3'-phosphate
  modified_base 9: mod_base = OTHER; note = 2'-deoxy-2'-fluorocytidine-3'-phosphate
  modified_base 10: mod_base = OTHER; note = 2'-deoxy-2'-fluoroadenosine-3'-phosphate
  modified_base 11: mod_base = OTHER; note = 2'-deoxy-2'-fluoroadenosine-3'-phosphate
  modified_base 12: mod_base = OTHER; note = 2'-deoxy-2'-fluoroguanosine-3'-phosphate
  modified_base 13: mod_base = OTHER; note = 2'-deoxy-2'-fluoroadenosine-3'-phosphate
  modified_base 14: mod_base = OTHER; note = 2'-deoxy-2'-fluoroadenosine-3'-phosphate
  modified_base 15: mod_base = OTHER; note = 2'-deoxy-2'-fluorocytidine-3'-phosphate
  modified_base 16: mod_base = OTHER; note = 2'-deoxy-2'-fluoroadenosine-3'-phosphate
  modified_base 17: mod_base = OTHER; note = 2'-deoxy-2'-fluorocytidine-3'-phosphate
  modified_base 18: mod_base = OTHER; note = 2'-deoxy-2'-fluorouridine-3'-phosphate
  modified_base 19: mod_base = OTHER; note = 2'-deoxy-2'-fluoroguanosine-3'-phosphate
  modified_base 20: mod_base = OTHER; note = 2'-deoxy-2'-fluorouridine-3'-phosphate
  modified_base 21: mod_base = OTHER; note = 2'-deoxy-2'-fluorouridine-3'-phosphorothioate
  modified_base 22: mod_base = OTHER; note = 2'-O-methyluridine-3'-phosphorothioate
  modified_base 23: mod_base = OTHER; note = 2'-O-methyluridine
ttatagagcaagaacactgtttt

SEQ ID NO: 842 - RNA, 23 nt, synthetic construct
  source 1..23: mol_type = other RNA
  modified_base 1: mod_base = OTHER; note = 2'-deoxy-2'-fluorouridine-3'-phosphate
  modified_base 2: mod_base = OTHER; note = 2'-deoxy-2'-fluorouridine-3'-phosphate
  modified_base 3: mod_base = OTHER; note = 2'-O-methyladenosine-3'-phosphate
  modified_base 4: mod_base = OTHER; note = 2'-O-methyluridine-3'-phosphate
  modified_base 5: mod_base = OTHER; note = 2'-O-methyladenosine-3'-phosphate
  modified_base 6: mod_base = OTHER; note = 2'-deoxy-2'-fluoroguanosine-3'-phosphate
  modified_base 7: mod_base = OTHER; note = 2'-O-methyladenosine-3'-phosphate
  modified_base 8: mod_base = OTHER; note = 2'-deoxy-2'-fluoroguanosine-3'-phosphate
  modified_base 9: mod_base = OTHER; note = 2'-O-methylcytidine-3'-phosphate
  modified_base 10: mod_base = OTHER; note = 2'-deoxy-2'-fluoroadenosine-3'-phosphate
  modified_base 11: mod_base = OTHER; note = 2'-O-methyladenosine-3'-phosphate
  modified_base 12: mod_base = OTHER; note = 2'-deoxy-2'-fluoroguanosine-3'-phosphate
  modified_base 13: mod_base = OTHER; note = 2'-O-methyladenosine-3'-phosphate
  modified_base 14: mod_base = OTHER; note = 2'-deoxy-2'-fluoroadenosine-3'-phosphate
  modified_base 15: mod_base = OTHER; note = 2'-O-methylcytidine-3'-phosphate
  modified_base 16: mod_base = OTHER; note = 2'-deoxy-2'-fluoroadenosine-3'-phosphate
  modified_base 17: mod_base = OTHER; note = 2'-O-methylcytidine-3'-phosphate
  modified_base 18: mod_base = OTHER; note = 2'-deoxy-2'-fluorouridine-3'-phosphate
  modified_base 19: mod_base = OTHER; note = 2'-O-methylguanosine-3'-phosphate
  modified_base 20: mod_base = OTHER; note = 2'-deoxy-2'-fluorouridine-3'-phosphate
  modified_base 21: mod_base = OTHER; note = 2'-O-methyluridine-3'-phosphorothioate
  modified_base 22: mod_base = OTHER; note = 2'-deoxy-2'-fluorouridine-3'-phosphorothioate
  modified_base 23: mod_base = OTHER; note = 2'-O-methyluridine
ttatagagcaagaacactgtttt

SEQ ID NO: 843 - RNA, 23 nt, synthetic construct
  source 1..23: mol_type = other RNA
  modified_base 1: mod_base = OTHER; note = 2'-deoxy-2'-fluorouridine-3'-phosphate
  modified_base 2: mod_base = OTHER; note = 2'-deoxy-2'-fluorouridine-3'-phosphate
  modified_base 3: mod_base = OTHER; note = 2'-O-methyladenosine-3'-phosphate
  modified_base 4: mod_base = OTHER; note = 2'-O-methyluridine-3'-phosphate
  modified_base 5: mod_base = OTHER; note = 2'-deoxy-2'-fluoroadenosine-3'-phosphate
  modified_base 6: mod_base = OTHER; note = 2'-deoxy-2'-fluoroguanosine-3'-phosphate
  modified_base 7: mod_base = OTHER; note = 2'-O-methyladenosine-3'-phosphate
  modified_base 8: mod_base = OTHER; note = 2'-O-methylguanosine-3'-phosphate
  modified_base 9: mod_base = OTHER; note = 2'-deoxy-2'-fluorocytidine-3'-phosphate
  modified_base 10: mod_base = OTHER; note = 2'-deoxy-2'-fluoroadenosine-3'-phosphate
  modified_base 11: mod_base = OTHER; note = 2'-O-methyladenosine-3'-phosphate
  modified_base 12: mod_base = OTHER; note = 2'-O-methylguanosine-3'-phosphate
  modified_base 13: mod_base = OTHER; note = 2'-deoxy-2'-fluoroadenosine-3'-phosphate
  modified_base 14: mod_base = OTHER; note = 2'-deoxy-2'-fluoroadenosine-3'-phosphate
  modified_base 15: mod_base = OTHER; note = 2'-O-methylcytidine-3'-phosphate
  modified_base 16: mod_base = OTHER; note = 2'-O-methyladenosine-3'-phosphate
  modified_base 17: mod_base = OTHER; note = 2'-deoxy-2'-fluorocytidine-3'-phosphate
  modified_base 18: mod_base = OTHER; note = 2'-deoxy-2'-fluorouridine-3'-phosphate
  modified_base 19: mod_base = OTHER; note = 2'-O-methylguanosine-3'-phosphate
  modified_base 20: mod_base = OTHER; note = 2'-O-methyluridine-3'-phosphate
  modified_base 21: mod_base = OTHER; note = 2'-deoxy-2'-fluorouridine-3'-phosphorothioate
  modified_base 22: mod_base = OTHER; note = 2'-deoxy-2'-fluorouridine-3'-phosphorothioate
  modified_base 23: mod_base = OTHER; note = 2'-O-methyluridine
ttatagagcaagaacactgtttt

SEQ ID NO: 844 - RNA, 23 nt, synthetic construct
  source 1..23: mol_type = other RNA
  modified_base 1: mod_base = OTHER; note = 2'-O-methyluridine-3'-phosphate
  modified_base 2: mod_base = OTHER; note = 2'-deoxy-2'-fluorouridine-3'-phosphate
  modified_base 3: mod_base = OTHER; note = 2'-O-methyladenosine-3'-phosphate
  modified_base 4: mod_base = OTHER; note = 2'-deoxy-2'-fluorouridine-3'-phosphate
  modified_base 5: mod_base = OTHER; note = 2'-O-methyladenosine-3'-phosphate
  modified_base 6: mod_base = OTHER; note = 2'-deoxy-2'-fluoroguanosine-3'-phosphate
  modified_base 7: mod_base = OTHER; note = 2'-O-methyladenosine-3'-phosphate
  modified_base 8: mod_base = OTHER; note = 2'-deoxy-2'-fluoroguanosine-3'-phosphate
  modified_base 9: mod_base = OTHER; note = 2'-O-methylcytidine-3'-phosphate
  modified_base 10: mod_base = OTHER; note = 2'-deoxy-2'-fluoroadenosine-3'-phosphate
  modified_base 11: mod_base = OTHER; note = 2'-O-methyladenosine-3'-phosphate
  modified_base 12: mod_base = OTHER; note = 2'-deoxy-2'-fluoroguanosine-3'-phosphate
  modified_base 13: mod_base = OTHER; note = 2'-O-methyladenosine-3'-phosphate
  modified_base 14: mod_base = OTHER; note = 2'-deoxy-2'-fluoroadenosine-3'-phosphate
  modified_base 15: mod_base = OTHER; note = 2'-O-methylcytidine-3'-phosphate
  modified_base 16: mod_base = OTHER; note = 2'-deoxy-2'-fluoroadenosine-3'-phosphate
  modified_base 17: mod_base = OTHER; note = 2'-O-methylcytidine-3'-phosphate
  modified_base 18: mod_base = OTHER; note = 2'-O-methyluridine-3'-phosphate
  modified_base 19: mod_base = OTHER; note = 2'-O-methylguanosine-3'-phosphate
  modified_base 20: mod_base = OTHER; note = 2'-deoxy-2'-fluorouridine-3'-phosphate
  modified_base 21: mod_base = OTHER; note = 2'-O-methyluridine-3'-phosphorothioate
  modified_base 22: mod_base = OTHER; note = 2'-deoxy-2'-fluorouridine-3'-phosphorothioate
  modified_base 23: mod_base = OTHER; note = 2'-deoxy-2'-fluorouridine
ttatagagcaagaacactgtttt

SEQ ID NO: 845 - RNA, 21 nt, synthetic construct
  source 1..21: mol_type = other RNA
  modified_base 1: mod_base = OTHER; note = 2'-deoxy-2'-fluorouridine-3'-phosphate
  modified_base 2: mod_base = OTHER; note = 2'-O-methylcytidine-3'-phosphate
  modified_base 3: mod_base = OTHER; note = 2'-deoxy-2'-fluoroadenosine-3'-phosphate
  modified_base 4: mod_base = OTHER; note = 2'-O-methylcytidine-3'-phosphate
  modified_base 5: mod_base = OTHER; note = 2'-deoxy-2'-fluoroadenosine-3'-phosphate
  modified_base 6: mod_base = OTHER; note = 2'-O-methyladenosine-3'-phosphate
  modified_base 7: mod_base = OTHER; note = 2'-deoxy-2'-fluorouridine-3'-phosphate
  modified_base 8: mod_base = OTHER; note = 2'-O-methyluridine-3'-phosphate
  modified_base 9: mod_base = OTHER; note = 2'-deoxy-2'-fluoroadenosine-3'-phosphate
  modified_base 10: mod_base = OTHER; note = 2'-deoxy-2'-fluoroadenosine-3'-phosphate
  modified_base 11: mod_base = OTHER; note = 2'-deoxy-2'-fluoroguanosine-3'-phosphate
  modified_base 12: mod_base = OTHER; note = 2'-O-methylcytidine-3'-phosphate
  modified_base 13: mod_base = OTHER; note = 2'-deoxy-2'-fluorouridine-3'-phosphate
  modified_base 14: mod_base = OTHER; note = 2'-O-methylcytidine-3'-phosphate
  modified_base 15: mod_base = OTHER; note = 2'-deoxy-2'-fluorocytidine-3'-phosphate
  modified_base 16: mod_base = OTHER; note = 2'-O-methyluridine-3'-phosphate
  modified_base 17: mod_base = OTHER; note = 2'-deoxy-2'-fluorouridine-3'-phosphate
  modified_base 18: mod_base = OTHER; note = 2'-O-methylcytidine-3'-phosphate
  modified_base 19: mod_base = OTHER; note = 2'-deoxy-2'-fluorouridine-3'-phosphate
  modified_base 20: mod_base = OTHER; note = 2'-O-methyluridine-3'-phosphate
  modified_base 21: mod_base = OTHER; note = 2'-deoxy-2'-fluorouridine
tcacaattaagctccttcttt

SEQ ID NO: 846 - RNA, 21 nt, synthetic construct
  source 1..21: mol_type = other RNA
  modified_base 1: mod_base = OTHER; note = 2'-deoxy-2'-fluorouridine-3'-phosphate
  modified_base 2: mod_base = OTHER; note = 2'-O-methyluridine-3'-phosphate
  modified_base 3: mod_base = OTHER; note = 2'-deoxy-2'-fluoroadenosine-3'-phosphate
  modified_base 4: mod_base = OTHER; note = 2'-O-methyluridine-3'-phosphate
  modified_base 5: mod_base = OTHER; note = 2'-deoxy-2'-fluorouridine-3'-phosphate
  modified_base 6: mod_base = OTHER; note = 2'-O-methylguanosine-3'-phosphate
  modified_base 7: mod_base = OTHER; note = 2'-deoxy-2'-fluorouridine-3'-phosphate
  modified_base 8: mod_base = OTHER; note = 2'-O-methyluridine-3'-phosphate
  modified_base 9: mod_base = OTHER; note = 2'-deoxy-2'-fluorocytidine-3'-phosphate
  modified_base 10: mod_base = OTHER; note = 2'-deoxy-2'-fluorocytidine-3'-phosphate
  modified_base 11: mod_base = OTHER; note = 2'-deoxy-2'-fluorouridine-3'-phosphate
  modified_base 12: mod_base = OTHER; note = 2'-O-methylcytidine-3'-phosphate
  modified_base 13: mod_base = OTHER; note = 2'-deoxy-2'-fluorouridine-3'-phosphate
  modified_base 14: mod_base = OTHER; note = 2'-O-methyladenosine-3'-phosphate
  modified_base 15: mod_base = OTHER; note = 2'-deoxy-2'-fluoroguanosine-3'-phosphate
  modified_base 16: mod_base = OTHER; note = 2'-O-methyluridine-3'-phosphate
  modified_base 17: mod_base = OTHER; note = 2'-deoxy-2'-fluorouridine-3'-phosphate
  modified_base 18: mod_base = OTHER; note = 2'-O-methyladenosine-3'-phosphate
  modified_base 19: mod_base = OTHER; note = 2'-deoxy-2'-fluorouridine-3'-phosphate
  modified_base 20: mod_base = OTHER; note = 2'-O-methyluridine-3'-phosphate
  modified_base 21: mod_base = OTHER; note = 2'-deoxy-2'-fluorouridine
ttattgttcctctagttattt

SEQ ID NO: 847 - RNA, 21 nt, synthetic construct
  source 1..21: mol_type = other RNA
  modified_base 1: mod_base = OTHER; note = 2'-deoxy-2'-fluoroguanosine-3'-phosphate
  modified_base 2: mod_base = OTHER; note = 2'-O-methylcytidine-3'-phosphate
  modified_base 3: mod_base = OTHER; note = 2'-deoxy-2'-fluorouridine-3'-phosphate
  modified_base 4: mod_base = OTHER; note = 2'-O-methyladenosine-3'-phosphate
  modified_base 5: mod_base = OTHER; note = 2'-deoxy-2'-fluorouridine-3'-phosphate
  modified_base 6: mod_base = OTHER; note = 2'-O-methylguanosine-3'-phosphate
  modified_base 7: mod_base = OTHER; note = 2'-deoxy-2'-fluorouridine-3'-phosphate
  modified_base 8: mod_base = OTHER; note = 2'-O-methyluridine-3'-phosphate
  modified_base 9: mod_base = OTHER; note = 2'-deoxy-2'-fluoroadenosine-3'-phosphate
  modified_base 10: mod_base = OTHER; note = 2'-deoxy-2'-fluoroguanosine-3'-phosphate
  modified_base 11: mod_base = OTHER; note = 2'-deoxy-2'-fluoroadenosine-3'-phosphate
  modified_base 12: mod_base = OTHER; note = 2'-O-methylcytidine-3'-phosphate
  modified_base 13: mod_base = OTHER; note = 2'-deoxy-2'-fluoroguanosine-3'-phosphate
  modified_base 14: mod_base = OTHER; note = 2'-O-methyladenosine-3'-phosphate
  modified_base 15: mod_base = OTHER; note = 2'-deoxy-2'-fluorouridine-3'-phosphate
  modified_base 16: mod_base = OTHER; note = 2'-O-methylguanosine-3'-phosphate
  modified_base 17: mod_base = OTHER; note = 2'-deoxy-2'-fluorouridine-3'-phosphate
  modified_base 18: mod_base = OTHER; note = 2'-O-methyladenosine-3'-phosphate
  modified_base 19: mod_base = OTHER; note = 2'-deoxy-2'-fluoroadenosine-3'-phosphate
  modified_base 20: mod_base = OTHER; note = 2'-O-methyladenosine-3'-phosphate
  modified_base 21: mod_base = OTHER; note = 2'-deoxy-2'-fluoroadenosine
gctatgttagacgatgtaaaa

SEQ ID NO: 848 - RNA, 21 nt, synthetic construct
  source 1..21: mol_type = other RNA
  modified_base 1: mod_base = OTHER; note = 2'-deoxy-2'-fluoroguanosine-3'-phosphate
  modified_base 2: mod_base = OTHER; note = 2'-O-methylguanosine-3'-phosphate
  modified_base 3: mod_base = OTHER; note = 2'-deoxy-2'-fluoroadenosine-3'-phosphate
  modified_base 4: mod_base = OTHER; note = 2'-O-methylcytidine-3'-phosphate
  modified_base 5: mod_base = OTHER; note = 2'-deoxy-2'-fluoroadenosine-3'-phosphate
  modified_base 6: mod_base = OTHER; note = 2'-O-methyluridine-3'-phosphate
  modified_base 7: mod_base = OTHER; note = 2'-deoxy-2'-fluoroguanosine-3'-phosphate
  modified_base 8: mod_base = OTHER; note = 2'-O-methylguanosine-3'-phosphate
  modified_base 9: mod_base = OTHER; note = 2'-deoxy-2'-fluorouridine-3'-phosphate
  modified_base 10: mod_base = OTHER; note = 2'-deoxy-2'-fluorocytidine-3'-phosphate
  modified_base 11: mod_base = OTHER; note = 2'-deoxy-2'-fluorouridine-3'-phosphate
  modified_base 12: mod_base = OTHER; note = 2'-O-methyluridine-3'-phosphate
  modified_base 13: mod_base = OTHER; note = 2'-deoxy-2'-fluoroadenosine-3'-phosphate
  modified_base 14: mod_base = OTHER; note = 2'-O-methyladenosine-3'-phosphate
  modified_base 15: mod_base = OTHER; note = 2'-deoxy-2'-fluoroadenosine-3'-phosphate
  modified_base 16: mod_base = OTHER; note = 2'-O-methylguanosine-3'-phosphate
  modified_base 17: mod_base = OTHER; note = 2'-deoxy-2'-fluoroadenosine-3'-phosphate
  modified_base 18: mod_base = OTHER; note = 2'-O-methylcytidine-3'-phosphate
  modified_base 19: mod_base = OTHER; note = 2'-deoxy-2'-fluorouridine-3'-phosphate
  modified_base 20: mod_base = OTHER; note = 2'-O-methyluridine-3'-phosphate
  modified_base 21: mod_base = OTHER; note = 2'-deoxy-2'-fluorouridine
ggacatggtcttaaagacttt

SEQ ID NO: 849 - RNA, 21 nt, synthetic construct
  source 1..21: mol_type = other RNA
  modified_base 1: mod_base = OTHER; note = 2'-deoxy-2'-fluorocytidine-3'-phosphate
  modified_base 2: mod_base = OTHER; note = 2'-O-methyladenosine-3'-phosphate
  modified_base 3: mod_base = OTHER; note = 2'-deoxy-2'-fluoroadenosine-3'-phosphate
  modified_base 4: mod_base = OTHER; note = 2'-O-methyladenosine-3'-phosphate
  modified_base 5: mod_base = OTHER; note = 2'-deoxy-2'-fluoroadenosine-3'-phosphate
  modified_base 6: mod_base = OTHER; note = 2'-O-methyladenosine-3'-phosphate
  modified_base 7: mod_base = OTHER; note = 2'-deoxy-2'-fluorocytidine-3'-phosphate
  modified_base 8: mod_base = OTHER; note = 2'-O-methyluridine-3'-phosphate
  modified_base 9: mod_base = OTHER; note = 2'-deoxy-2'-fluorocytidine-3'-phosphate
  modified_base 10: mod_base = OTHER; note = 2'-deoxy-2'-fluoroadenosine-3'-phosphate
  modified_base 11: mod_base = OTHER; note = 2'-deoxy-2'-fluoroadenosine-3'-phosphate
  modified_base 12: mod_base = OTHER; note = 2'-O-methylcytidine-3'-phosphate
  modified_base 13: mod_base = OTHER; note = 2'-deoxy-2'-fluoroadenosine-3'-phosphate
  modified_base 14: mod_base = OTHER; note = 2'-O-methyluridine-3'-phosphate
  modified_base 15: mod_base = OTHER; note = 2'-deoxy-2'-fluoroadenosine-3'-phosphate
  modified_base 16: mod_base = OTHER; note = 2'-O-methyluridine-3'-phosphate
  modified_base 17: mod_base = OTHER; note = 2'-deoxy-2'-fluorouridine-3'-phosphate
  modified_base 18: mod_base = OTHER; note = 2'-O-methyluridine-3'-phosphate
  modified_base 19: mod_base = OTHER; note = 2'-deoxy-2'-fluoroguanosine-3'-phosphate
  modified_base 20: mod_base = OTHER; note = 2'-O-methyladenosine-3'-phosphate
  modified_base 21: mod_base = OTHER; note = 2'-deoxy-2'-fluorouridine
caaaaactcaacatatttgat

SEQ ID NO: 850 - RNA, 21 nt, synthetic construct
  source 1..21: mol_type = other RNA
  modified_base 1: mod_base = OTHER; note = 2'-deoxy-2'-fluoroadenosine-3'-phosphate
  modified_base 2: mod_base = OTHER; note = 2'-O-methylcytidine-3'-phosphate
  modified_base 3: mod_base = OTHER; note = 2'-deoxy-2'-fluorocytidine-3'-phosphate
  modified_base 4: mod_base = OTHER; note = 2'-O-methyladenosine-3'-phosphate
  modified_base 5: mod_base = OTHER; note = 2'-deoxy-2'-fluoroguanosine-3'-phosphate
  modified_base 6: mod_base = OTHER; note = 2'-O-methyluridine-3'-phosphate
  modified_base 7: mod_base = OTHER; note = 2'-deoxy-2'-fluoroguanosine-3'-phosphate
  modified_base 8: mod_base = OTHER; note = 2'-O-methyladenosine-3'-phosphate
  modified_base 9: mod_base = OTHER; note = 2'-deoxy-2'-fluoroadenosine-3'-phosphate
  modified_base 10: mod_base = OTHER; note = 2'-deoxy-2'-fluoroadenosine-3'-phosphate
  modified_base 11: mod_base = OTHER; note = 2'-deoxy-2'-fluorouridine-3'-phosphate
  modified_base 12: mod_base = OTHER; note = 2'-O-methylcytidine-3'-phosphate
  modified_base 13: mod_base = OTHER; note = 2'-deoxy-2'-fluoroadenosine-3'-phosphate
  modified_base 14: mod_base = OTHER; note = 2'-O-methyladenosine-3'-phosphate
  modified_base 15: mod_base = OTHER; note = 2'-deoxy-2'-fluoroadenosine-3'-phosphate
  modified_base 16: mod_base = OTHER; note = 2'-O-methylguanosine-3'-phosphate
  modified_base 17: mod_base = OTHER; note = 2'-deoxy-2'-fluoroadenosine-3'-phosphate
  modified_base 18: mod_base = OTHER; note = 2'-O-methyladenosine-3'-phosphate
  modified_base 19: mod_base = OTHER; note = 2'-deoxy-2'-fluoroguanosine-3'-phosphate
  modified_base 20: mod_base = OTHER; note = 2'-O-methyladenosine-3'-phosphate
  modified_base 21: mod_base = OTHER; note = 2'-deoxy-2'-fluoroadenosine
accagtgaaatcaaagaagaa

SEQ ID NO: 851 - RNA, 21 nt, synthetic construct
  source 1..21: mol_type = other RNA
  modified_base 1: mod_base = OTHER; note = 2'-deoxy-2'-fluorocytidine-3'-phosphate
  modified_base 2: mod_base = OTHER; note = 2'-O-methyladenosine-3'-phosphate
  modified_base 3: mod_base = OTHER; note = 2'-deoxy-2'-fluorocytidine-3'-phosphate
  modified_base 4: mod_base = OTHER; note = 2'-O-methyladenosine-3'-phosphate
  modified_base 5: mod_base = OTHER; note = 2'-deoxy-2'-fluoroadenosine-3'-phosphate
  modified_base 6: mod_base = OTHER; note = 2'-O-methyluridine-3'-phosphate
  modified_base 7: mod_base = OTHER; note = 2'-deoxy-2'-fluorouridine-3'-phosphate
  modified_base 8: mod_base = OTHER; note = 2'-O-methyladenosine-3'-phosphate
  modified_base 9: mod_base = OTHER; note = 2'-deoxy-2'-fluoroadenosine-3'-phosphate
  modified_base 10: mod_base = OTHER; note = 2'-deoxy-2'-fluoroguanosine-3'-phosphate
  modified_base 11: mod_base = OTHER; note = 2'-deoxy-2'-fluorocytidine-3'-phosphate
  modified_base 12: mod_base = OTHER; note = 2'-O-methyluridine-3'-phosphate
  modified_base 13: mod_base = OTHER; note = 2'-deoxy-2'-fluorocytidine-3'-phosphate
  modified_base 14: mod_base = OTHER; note = 2'-O-methylcytidine-3'-phosphate
  modified_base 15: mod_base = OTHER; note = 2'-deoxy-2'-fluorouridine-3'-phosphate
  modified_base 16: mod_base = OTHER; note = 2'-O-methyluridine-3'-phosphate
  modified_base 17: mod_base = OTHER; note = 2'-deoxy-2'-fluorocytidine-3'-phosphate
  modified_base 18: mod_base = OTHER; note = 2'-O-methyluridine-3'-phosphate
  modified_base 19: mod_base = OTHER; note = 2'-deoxy-2'-fluorouridine-3'-phosphate
  modified_base 20: mod_base = OTHER; note = 2'-O-methyluridine-3'-phosphate
  modified_base 21: mod_base = OTHER; note = 2'-deoxy-2'-fluorouridine
cacaattaagctccttctttt

SEQ ID NO: 852 - RNA, 21 nt, synthetic construct
  source 1..21: mol_type = other RNA
  modified_base 1: mod_base = OTHER; note = 2'-deoxy-2'-fluorocytidine-3'-phosphate
  modified_base 2: mod_base = OTHER; note = 2'-O-methyluridine-3'-phosphate
  modified_base 3: mod_base = OTHER; note = 2'-deoxy-2'-fluoroadenosine-3'-phosphate
  modified_base 4: mod_base = OTHER; note = 2'-O-methyluridine-3'-phosphate
  modified_base 5: mod_base = OTHER; note = 2'-deoxy-2'-fluoroguanosine-3'-phosphate
  modified_base 6: mod_base = OTHER; note = 2'-O-methyluridine-3'-phosphate
  modified_base 7: mod_base = OTHER; note = 2'-deoxy-2'-fluorouridine-3'-phosphate
  modified_base 8: mod_base = OTHER; note = 2'-O-methyladenosine-3'-phosphate
  modified_base 9: mod_base = OTHER; note = 2'-deoxy-2'-fluoroguanosine-3'-phosphate
  modified_base 10: mod_base = OTHER; note = 2'-deoxy-2'-fluoroadenosine-3'-phosphate
  modified_base 11: mod_base = OTHER; note = 2'-deoxy-2'-fluorocytidine-3'-phosphate
  modified_base 12: mod_base = OTHER; note = 2'-O-methylguanosine-3'-phosphate
  modified_base 13: mod_base = OTHER; note = 2'-deoxy-2'-fluoroadenosine-3'-phosphate
  modified_base 14: mod_base = OTHER; note = 2'-O-methyluridine-3'-phosphate
  modified_base 15: mod_base = OTHER; note = 2'-deoxy-2'-fluoroguanosine-3'-phosphate
  modified_base 16: mod_base = OTHER; note = 2'-O-methyluridine-3'-phosphate
  modified_base 17: mod_base = OTHER; note = 2'-deoxy-2'-fluoroadenosine-3'-phosphate
  modified_base 18: mod_base = OTHER; note = 2'-O-methyladenosine-3'-phosphate
  modified_base 19: mod_base = OTHER; note = 2'-deoxy-2'-fluoroadenosine-3'-phosphate
  modified_base 20: mod_base = OTHER; note = 2'-O-methyladenosine-3'-phosphate
  modified_base 21: mod_base = OTHER; note = 2'-deoxy-2'-fluoroadenosine
ctatgttagacgatgtaaaaa

SEQ ID NO: 853 - RNA, 21 nt, synthetic construct
  source 1..21: mol_type = other RNA
  modified_base 1: mod_base = OTHER; note = 2'-deoxy-2'-fluorouridine-3'-phosphate
  modified_base 2: mod_base = OTHER; note = 2'-O-methylcytidine-3'-phosphate
  modified_base 3: mod_base = OTHER; note = 2'-deoxy-2'-fluoroadenosine-3'-phosphate
  modified_base 4: mod_base = OTHER; note = 2'-O-methyladenosine-3'-phosphate
  modified_base 5: mod_base = OTHER; note = 2'-deoxy-2'-fluorocytidine-3'-phosphate
  modified_base 6: mod_base = OTHER; note = 2'-O-methyladenosine-3'-phosphate
  modified_base 7: mod_base = OTHER; note = 2'-deoxy-2'-fluorouridine-3'-phosphate
  modified_base 8: mod_base = OTHER; note = 2'-O-methyladenosine-3'-phosphate
  modified_base 9: mod_base = OTHER; note = 2'-deoxy-2'-fluorouridine-3'-phosphate
  modified_base 10: mod_base = OTHER; note = 2'-deoxy-2'-fluorouridine-3'-phosphate
  modified_base 11: mod_base = OTHER; note = 2'-deoxy-2'-fluorouridine-3'-phosphate
  modified_base 12: mod_base = OTHER; note = 2'-O-methylguanosine-3'-phosphate
  modified_base 13: mod_base = OTHER; note = 2'-deoxy-2'-fluoroadenosine-3'-phosphate
  modified_base 14: mod_base = OTHER; note = 2'-O-methyluridine-3'-phosphate
  modified_base 15: mod_base = OTHER; note = 2'-deoxy-2'-fluorocytidine-3'-phosphate
  modified_base 16: mod_base = OTHER; note = 2'-O-methyladenosine-3'-phosphate
  modified_base 17: mod_base = OTHER; note = 2'-deoxy-2'-fluoroguanosine-3'-phosphate
  modified_base 18: mod_base = OTHER; note = 2'-O-methyluridine-3'-phosphate
  modified_base 19: mod_base = OTHER; note = 2'-deoxy-2'-fluorocytidine-3'-phosphate
  modified_base 20: mod_base = OTHER; note = 2'-O-methyluridine-3'-phosphate
  modified_base 21: mod_base = OTHER; note = 2'-deoxy-2'-fluorouridine
tcaacatatttgatcagtctt

SEQ ID NO: 854 - RNA, 21 nt, synthetic construct
  source 1..21: mol_type = other RNA
  modified_base 1: mod_base = OTHER; note = 2'-deoxy-2'-fluoroadenosine-3'-phosphate
  modified_base 2: mod_base = OTHER; note = 2'-O-methyladenosine-3'-phosphate
  modified_base 3: mod_base = OTHER; note = 2'-deoxy-2'-fluorocytidine-3'-phosphate
  modified_base 4: mod_base = OTHER; note = 2'-O-methyluridine-3'-phosphate
  modified_base 5: mod_base = OTHER; note = 2'-deoxy-2'-fluoroguanosine-3'-phosphate
  modified_base 6: mod_base = OTHER; note = 2'-O-methyladenosine-3'-phosphate
  modified_base 7: mod_base = OTHER; note = 2'-deoxy-2'-fluoroguanosine-3'-phosphate
  modified_base 8: mod_base = OTHER; note = 2'-O-methyladenosine-3'-phosphate
  modified_base 9: mod_base = OTHER; note = 2'-deoxy-2'-fluoroadenosine-3'-phosphate
  modified_base 10: mod_base = OTHER; note = 2'-deoxy-2'-fluoroguanosine-3'-phosphate
  modified_base 11: mod_base = OTHER; note = 2'-deoxy-2'-fluoroadenosine-3'-phosphate
  modified_base 12: mod_base = OTHER; note = 2'-O-methyladenosine-3'-phosphate
  modified_base 13: mod_base = OTHER; note = 2'-deoxy-2'-fluorocytidine-3'-phosphate
  modified_base 14: mod_base = OTHER; note = 2'-O-methyluridine-3'-phosphate
  modified_base 15: mod_base = OTHER; note = 2'-deoxy-2'-fluoroadenosine-3'-phosphate
  modified_base 16: mod_base = OTHER; note = 2'-O-methylcytidine-3'-phosphate
  modified_base 17: mod_base = OTHER; note = 2'-deoxy-2'-fluoroadenosine-3'-phosphate
  modified_base 18: mod_base = OTHER; note = 2'-O-methyluridine-3'-phosphate
  modified_base 19: mod_base = OTHER; note = 2'-deoxy-2'-fluoroadenosine-3'-phosphate
  modified_base 20: mod_base = OTHER; note = 2'-O-methyluridine-3'-phosphate
  modified_base 21: mod_base = OTHER; note = 2'-deoxy-2'-fluoroadenosine
aactgagaagaactacatata

SEQ ID NO: 855 - RNA, 21 nt, synthetic construct
  source 1..21: mol_type = other RNA
  modified_base 1: mod_base = OTHER; note = 2'-deoxy-2'-fluoroadenosine-3'-phosphate
  modified_base 2: mod_base = OTHER; note = 2'-O-methylcytidine-3'-phosphate
  modified_base 3: mod_base = OTHER; note = 2'-deoxy-2'-fluoroadenosine-3'-phosphate
  modified_base 4: mod_base = OTHER; note = 2'-O-methyladenosine-3'-phosphate
  modified_base 5: mod_base = OTHER; note = 2'-deoxy-2'-fluorouridine-3'-phosphate
  modified_base 6: mod_base = OTHER; note = 2'-O-methyluridine-3'-phosphate
  modified_base 7: mod_base = OTHER; note = 2'-deoxy-2'-fluoroadenosine-3'-phosphate
  modified_base 8: mod_base = OTHER; note = 2'-O-methyladenosine-3'-phosphate
  modified_base 9: mod_base = OTHER; note = 2'-deoxy-2'-fluoroguanosine-3'-phosphate
  modified_base 10: mod_base = OTHER; note = 2'-deoxy-2'-fluorocytidine-3'-phosphate
  modified_base 11: mod_base = OTHER; note = 2'-deoxy-2'-fluorouridine-3'-phosphate
  modified_base 12: mod_base = OTHER; note = 2'-O-methylcytidine-3'-phosphate
  modified_base 13: mod_base = OTHER; note = 2'-deoxy-2'-fluorocytidine-3'-phosphate
  modified_base 14: mod_base = OTHER; note = 2'-O-methyluridine-3'-phosphate
  modified_base 15: mod_base = OTHER; note = 2'-deoxy-2'-fluorouridine-3'-phosphate
  modified_base 16: mod_base = OTHER; note = 2'-O-methylcytidine-3'-phosphate
  modified_base 17: mod_base = OTHER; note = 2'-deoxy-2'-fluorouridine-3'-phosphate
  modified_base 18: mod_base = OTHER; note = 2'-O-methyluridine-3'-phosphate
  modified_base 19: mod_base = OTHER; note = 2'-deoxy-2'-fluorouridine-3'-phosphate
  modified_base 20: mod_base = OTHER; note = 2'-O-methyluridine-3'-phosphate
  modified_base 21: mod_base = OTHER; note = 2'-deoxy-2'-fluorouridine
acaattaagctccttcttttt

SEQ ID NO: 856 - RNA, 21 nt, synthetic construct
  source 1..21: mol_type = other RNA
  modified_base 1: mod_base = OTHER; note = 2'-deoxy-2'-fluorocytidine-3'-phosphate
  modified_base 2: mod_base = OTHER; note = 2'-O-methyluridine-3'-phosphate
  modified_base 3: mod_base = OTHER; note = 2'-deoxy-2'-fluorocytidine-3'-phosphate
  modified_base 4: mod_base = OTHER; note = 2'-O-methylcytidine-3'-phosphate
  modified_base 5: mod_base = OTHER; note = 2'-deoxy-2'-fluoroadenosine-3'-phosphate
  modified_base 6: mod_base = OTHER; note = 2'-O-methylguanosine-3'-phosphate
  modified_base 7: mod_base = OTHER; note = 2'-deoxy-2'-fluoroadenosine-3'-phosphate
  modified_base 8: mod_base = OTHER; note = 2'-O-methylguanosine-3'-phosphate
  modified_base 9: mod_base = OTHER; note = 2'-deoxy-2'-fluorocytidine-3'-phosphate
  modified_base 10: mod_base = OTHER; note = 2'-deoxy-2'-fluorocytidine-3'-phosphate
  modified_base 11: mod_base = OTHER; note = 2'-deoxy-2'-fluoroadenosine-3'-phosphate
  modified_base 12: mod_base = OTHER; note = 2'-O-methyladenosine-3'-phosphate
  modified_base 13: mod_base = OTHER; note = 2'-deoxy-2'-fluoroadenosine-3'-phosphate
  modified_base 14: mod_base = OTHER; note = 2'-O-methyladenosine-3'-phosphate
  modified_base 15: mod_base = OTHER; note = 2'-deoxy-2'-fluorouridine-3'-phosphate
  modified_base 16: mod_base = OTHER; note = 2'-O-methylcytidine-3'-phosphate
  modified_base 17: mod_base = OTHER; note = 2'-deoxy-2'-fluoroadenosine-3'-phosphate
  modified_base 18: mod_base = OTHER; note = 2'-O-methyladenosine-3'-phosphate
  modified_base 19: mod_base = OTHER; note = 2'-deoxy-2'-fluoroguanosine-3'-phosphate
  modified_base 20: mod_base = OTHER; note = 2'-O-methyladenosine-3'-phosphate
  modified_base 21: mod_base = OTHER; note = 2'-deoxy-2'-fluorouridine
ctccagagccaaaatcaagat

SEQ ID NO: 857 - RNA, 21 nt, synthetic construct
  source 1..21: mol_type = other RNA
  modified_base 1: mod_base = OTHER; note = 2'-deoxy-2'-fluorocytidine-3'-phosphate
  modified_base 2: mod_base = OTHER; note = 2'-O-methylguanosine-3'-phosphate
  modified_base 3: mod_base = OTHER; note = 2'-deoxy-2'-fluoroadenosine-3'-phosphate
  modified_base 4: mod_base = OTHER; note = 2'-O-methyluridine-3'-phosphate
  modified_base 5: mod_base = OTHER; note = 2'-deoxy-2'-fluoroguanosine-3'-phosphate
  modified_base 6: mod_base = OTHER; note = 2'-O-methyluridine-3'-phosphate
  modified_base 7: mod_base = OTHER; note = 2'-deoxy-2'-fluoroadenosine-3'-phosphate
  modified_base 8: mod_base = OTHER; note = 2'-O-methyladenosine-3'-phosphate
  modified_base 9: mod_base = OTHER; note = 2'-deoxy-2'-fluoroadenosine-3'-phosphate
  modified_base 10: mod_base = OTHER; note = 2'-deoxy-2'-fluoroadenosine-3'-phosphate
  modified_base 11: mod_base = OTHER; note = 2'-deoxy-2'-fluoroadenosine-3'-phosphate
  modified_base 12: mod_base = OTHER; note = 2'-O-methyluridine-3'-phosphate
  modified_base 13: mod_base = OTHER; note = 2'-deoxy-2'-fluorouridine-3'-phosphate
  modified_base 14: mod_base = OTHER; note = 2'-O-methyluridine-3'-phosphate
  modified_base 15: mod_base = OTHER; note = 2'-deoxy-2'-fluorouridine-3'-phosphate
  modified_base 16: mod_base = OTHER; note = 2'-O-methyladenosine-3'-phosphate
  modified_base 17: mod_base = OTHER; note = 2'-deoxy-2'-fluoroguanosine-3'-phosphate
  modified_base 18: mod_base = OTHER; note = 2'-O-methylcytidine-3'-phosphate
  modified_base 19: mod_base = OTHER; note = 2'-deoxy-2'-fluorocytidine-3'-phosphate
  modified_base 20: mod_base = OTHER; note = 2'-O-methyladenosine-3'-phosphate
  modified_base 21: mod_base = OTHER; note = 2'-deoxy-2'-fluoroadenosine
cgatgtaaaaattttagccaa

SEQ ID NO: 858 - RNA, 21 nt, synthetic construct
  source 1..21: mol_type = other RNA
  modified_base 1: mod_base = OTHER; note = 2'-deoxy-2'-fluoroguanosine-3'-phosphate
  modified_base 2: mod_base = OTHER; note = 2'-O-methyluridine-3'-phosphate
  modified_base 3: mod_base = OTHER; note = 2'-deoxy-2'-fluorocytidine-3'-phosphate
  modified_base 4: mod_base = OTHER; note = 2'-O-methyluridine-3'-phosphate
  modified_base 5: mod_base = OTHER; note = 2'-deoxy-2'-fluorouridine-3'-phosphate
  modified_base 6: mod_base = OTHER; note = 2'-O-methyladenosine-3'-phosphate
  modified_base 7: mod_base = OTHER; note = 2'-deoxy-2'-fluoroadenosine-3'-phosphate
  modified_base 8: mod_base = OTHER; note = 2'-O-methyladenosine-3'-phosphate
  modified_base 9: mod_base = OTHER; note = 2'-deoxy-2'-fluoroguanosine-3'-phosphate
  modified_base 10: mod_base = OTHER; note = 2'-deoxy-2'-fluoroadenosine-3'-phosphate
  modified_base 11: mod_base = OTHER; note = 2'-deoxy-2'-fluorocytidine-3'-phosphate
  modified_base 12: mod_base = OTHER; note = 2'-O-methyluridine-3'-phosphate
  modified_base 13: mod_base = OTHER; note = 2'-deoxy-2'-fluorouridine-3'-phosphate
  modified_base 14: mod_base = OTHER; note = 2'-O-methyluridine-3'-phosphate
  modified_base 15: mod_base = OTHER; note = 2'-deoxy-2'-fluoroguanosine-3'-phosphate
  modified_base 16: mod_base = OTHER; note = 2'-O-methyluridine-3'-phosphate
  modified_base 17: mod_base = OTHER; note = 2'-deoxy-2'-fluorocytidine-3'-phosphate
  modified_base 18: mod_base = OTHER; note = 2'-O-methylcytidine-3'-phosphate
  modified_base 19: mod_base = OTHER; note = 2'-deoxy-2'-fluoroadenosine-3'-phosphate
  modified_base 20: mod_base = OTHER; note = 2'-O-methyluridine-3'-phosphate
  modified_base 21: mod_base = OTHER; note = 2'-deoxy-2'-fluoroadenosine
gtcttaaagactttgtccata

SEQ ID NO: 859 - RNA, 21 nt, synthetic construct
  source 1..21: mol_type = other RNA
  modified_base 1: mod_base = OTHER; note = 2'-deoxy-2'-fluorocytidine-3'-phosphate
  modified_base 2: mod_base = OTHER; note = 2'-O-methyladenosine-3'-phosphate
  modified_base 3: mod_base = OTHER; note = 2'-deoxy-2'-fluoroadenosine-3'-phosphate
  modified_base 4: mod_base = OTHER; note = 2'-O-methylcytidine-3'-phosphate
  modified_base 5: mod_base = OTHER; note = 2'-deoxy-2'-fluoroadenosine-3'-phosphate
  modified_base 6: mod_base = OTHER; note = 2'-O-methyluridine-3'-phosphate
  modified_base 7: mod_base = OTHER; note = 2'-deoxy-2'-fluoroadenosine-3'-phosphate
  modified_base 8: mod_base = OTHER; note = 2'-O-methyluridine-3'-phosphate
  modified_base 9: mod_base = OTHER; note = 2'-deoxy-2'-fluorouridine-3'-phosphate
  modified_base 10: mod_base = OTHER; note = 2'-deoxy-2'-fluorouridine-3'-phosphate
  modified_base 11: mod_base = OTHER; note = 2'-deoxy-2'-fluoroguanosine-3'-phosphate
  modified_base 12: mod_base = OTHER; note = 2'-O-methyladenosine-3'-phosphate
  modified_base 13: mod_base = OTHER; note = 2'-deoxy-2'-fluorouridine-3'-phosphate
  modified_base 14: mod_base = OTHER; note = 2'-O-methylcytidine-3'-phosphate
  modified_base 15: mod_base = OTHER; note = 2'-deoxy-2'-fluoroadenosine-3'-phosphate
  modified_base 16: mod_base = OTHER; note = 2'-O-methylguanosine-3'-phosphate
  modified_base 17: mod_base = OTHER; note = 2'-deoxy-2'-fluorouridine-3'-phosphate
  modified_base 18: mod_base = OTHER; note = 2'-O-methylcytidine-3'-phosphate
  modified_base 19: mod_base = OTHER; note = 2'-deoxy-2'-fluorouridine-3'-phosphate
  modified_base 20: mod_base = OTHER; note = 2'-O-methyluridine-3'-phosphate
  modified_base 21: mod_base = OTHER; note = 2'-deoxy-2'-fluorouridine
caacatatttgatcagtcttt

SEQ ID NO: 860 - RNA, 21 nt, synthetic construct
  source 1..21: mol_type = other RNA
  modified_base 1: mod_base = OTHER; note = 2'-deoxy-2'-fluoroadenosine-3'-phosphate
  modified_base 2: mod_base = OTHER; note = 2'-O-methylcytidine-3'-phosphate
  modified_base 3: mod_base = OTHER; note = 2'-deoxy-2'-fluorouridine-3'-phosphate
  modified_base 4: mod_base = OTHER; note = 2'-O-methylguanosine-3'-phosphate
  modified_base 5: mod_base = OTHER; note = 2'-deoxy-2'-fluoroadenosine-3'-phosphate
  modified_base 6: mod_base = OTHER; note = 2'-O-methylguanosine-3'-phosphate
  modified_base 7: mod_base = OTHER; note = 2'-deoxy-2'-fluoroadenosine-3'-phosphate
  modified_base 8: mod_base = OTHER; note = 2'-O-methyladenosine-3'-phosphate
  modified_base 9: mod_base = OTHER; note = 2'-deoxy-2'-fluoroguanosine-3'-phosphate
  modified_base 10: mod_base = OTHER; note = 2'-deoxy-2'-fluoroadenosine-3'-phosphate
  modified_base 11: mod_base = OTHER; note = 2'-deoxy-2'-fluoroadenosine-3'-phosphate
  modified_base 12: mod_base = OTHER; note = 2'-O-methylcytidine-3'-phosphate
  modified_base 13: mod_base = OTHER; note = 2'-deoxy-2'-fluorouridine-3'-phosphate
  modified_base 14: mod_base = OTHER; note = 2'-O-methyladenosine-3'-phosphate
  modified_base 15: mod_base = OTHER; note = 2'-deoxy-2'-fluorocytidine-3'-phosphate
  modified_base 16: mod_base = OTHER; note = 2'-O-methyladenosine-3'-phosphate
  modified_base 17: mod_base = OTHER; note = 2'-deoxy-2'-fluorouridine-3'-phosphate
  modified_base 18: mod_base = OTHER; note = 2'-O-methyladenosine-3'-phosphate
  modified_base 19: mod_base = OTHER; note = 2'-deoxy-2'-fluorouridine-3'-phosphate
  modified_base 20: mod_base = OTHER; note = 2'-O-methyladenosine-3'-phosphate
  modified_base 21: mod_base = OTHER; note = 2'-deoxy-2'-fluoroadenosine
actgagaagaactacatataa

SEQ ID NO: 861 - RNA, 21 nt, synthetic construct
  source 1..21: mol_type = other RNA
  modified_base 1: mod_base = OTHER; note = 2'-deoxy-2'-fluorocytidine-3'-phosphate
  modified_base 2: mod_base = OTHER; note = 2'-O-methylcytidine-3'-phosphate
  modified_base 3: mod_base = OTHER; note = 2'-deoxy-2'-fluoroadenosine-3'-phosphate
  modified_base 4: mod_base = OTHER; note = 2'-O-methylguanosine-3'-phosphate
  modified_base 5: mod_base = OTHER; note = 2'-deoxy-2'-fluoroadenosine-3'-phosphate
  modified_base 6: mod_base = OTHER; note = 2'-O-methylguanosine-3'-phosphate
  modified_base 7: mod_base = OTHER; note = 2'-deoxy-2'-fluorocytidine-3'-phosphate
  modified_base 8: mod_base = OTHER; note = 2'-O-methylcytidine-3'-phosphate
  modified_base 9: mod_base = OTHER; note = 2'-deoxy-2'-fluoroadenosine-3'-phosphate
  modified_base 10: mod_base = OTHER; note = 2'-deoxy-2'-fluoroadenosine-3'-phosphate
  modified_base 11: mod_base = OTHER; note = 2'-deoxy-2'-fluoroadenosine-3'-phosphate
  modified_base 12: mod_base = OTHER; note = 2'-O-methyladenosine-3'-phosphate
  modified_base 13: mod_base = OTHER; note = 2'-deoxy-2'-fluorouridine-3'-phosphate
  modified_base 14: mod_base = OTHER; note = 2'-O-methylcytidine-3'-phosphate
  modified_base 15: mod_base = OTHER; note = 2'-deoxy-2'-fluoroadenosine-3'-phosphate
  modified_base 16: mod_base = OTHER; note = 2'-O-methyladenosine-3'-phosphate
  modified_base 17: mod_base = OTHER; note = 2'-deoxy-2'-fluoroguanosine-3'-phosphate
  modified_base 18: mod_base = OTHER; note = 2'-O-methyladenosine-3'-phosphate
  modified_base 19: mod_base = OTHER; note = 2'-deoxy-2'-fluorouridine-3'-phosphate
  modified_base 20: mod_base = OTHER; note = 2'-O-methyluridine-3'-phosphate
  modified_base 21: mod_base = OTHER; note = 2'-deoxy-2'-fluorouridine
ccagagccaaaatcaagattt

SEQ ID NO: 862 - RNA, 21 nt, synthetic construct
  source 1..21: mol_type = other RNA
  modified_base 1: mod_base = OTHER; note = 2'-deoxy-2'-fluoroguanosine-3'-phosphate
  modified_base 2: mod_base = OTHER; note = 2'-O-methyladenosine-3'-phosphate
  modified_base 3: mod_base = OTHER; note = 2'-deoxy-2'-fluorouridine-3'-phosphate
  modified_base 4: mod_base = OTHER; note = 2'-O-methylguanosine-3'-phosphate
  modified_base 5: mod_base = OTHER; note = 2'-deoxy-2'-fluorouridine-3'-phosphate
  modified_base 6: mod_base = OTHER; note = 2'-O-methyladenosine-3'-phosphate
  modified_base 7: mod_base = OTHER; note = 2'-deoxy-2'-fluoroadenosine-3'-phosphate
  modified_base 8: mod_base = OTHER; note = 2'-O-methyladenosine-3'-phosphate
  modified_base 9: mod_base = OTHER; note = 2'-deoxy-2'-fluoroadenosine-3'-phosphate
  modified_base 10: mod_base = OTHER; note = 2'-deoxy-2'-fluoroadenosine-3'-phosphate
  modified_base 11: mod_base = OTHER; note = 2'-deoxy-2'-fluorouridine-3'-phosphate
  modified_base 12: mod_base = OTHER; note = 2'-O-methyluridine-3'-phosphate
  modified_base 13: mod_base = OTHER; note = 2'-deoxy-2'-fluorouridine-3'-phosphate
  modified_base 14: mod_base = OTHER; note = 2'-O-methyluridine-3'-phosphate
  modified_base 15: mod_base = OTHER; note = 2'-deoxy-2'-fluoroadenosine-3'-phosphate
  modified_base 16: mod_base = OTHER; note = 2'-O-methylguanosine-3'-phosphate
  modified_base 17: mod_base = OTHER; note = 2'-deoxy-2'-fluorocytidine-3'-phosphate
  modified_base 18: mod_base = OTHER; note = 2'-O-methylcytidine-3'-phosphate
  modified_base 19: mod_base = OTHER; note = 2'-deoxy-2'-fluoroadenosine-3'-phosphate
  modified_base 20: mod_base = OTHER; note = 2'-O-methyladenosine-3'-phosphate
  modified_base 21: mod_base = OTHER; note = 2'-deoxy-2'-fluorouridine
gatgtaaaaattttagccaat

SEQ ID NO: 863 - RNA, 21 nt, synthetic construct
  source 1..21: mol_type = other RNA
  modified_base 1: mod_base = OTHER; note = 2'-deoxy-2'-fluorouridine-3'-phosphate
  modified_base 2: mod_base = OTHER; note = 2'-O-methylcytidine-3'-phosphate
  modified_base 3: mod_base = OTHER; note = 2'-deoxy-2'-fluorouridine-3'-phosphate
  modified_base 4: mod_base = OTHER; note = 2'-O-methyluridine-3'-phosphate
  modified_base 5: mod_base = OTHER; note = 2'-deoxy-2'-fluoroadenosine-3'-phosphate
  modified_base 6: mod_base = OTHER; note = 2'-O-methyladenosine-3'-phosphate
  modified_base 7: mod_base = OTHER; note = 2'-deoxy-2'-fluoroadenosine-3'-phosphate
  modified_base 8: mod_base = OTHER; note = 2'-O-methylguanosine-3'-phosphate
  modified_base 9: mod_base = OTHER; note = 2'-deoxy-2'-fluoroadenosine-3'-phosphate
  modified_base 10: mod_base = OTHER; note = 2'-deoxy-2'-fluorocytidine-3'-phosphate
  modified_base 11: mod_base = OTHER; note = 2'-deoxy-2'-fluorouridine-3'-phosphate
  modified_base 12: mod_base = OTHER; note = 2'-O-methyluridine-3'-phosphate
  modified_base 13: mod_base = OTHER; note = 2'-deoxy-2'-fluorouridine-3'-phosphate
  modified_base 14: mod_base = OTHER; note = 2'-O-methylguanosine-3'-phosphate
  modified_base 15: mod_base = OTHER; note = 2'-deoxy-2'-fluorouridine-3'-phosphate
  modified_base 16: mod_base = OTHER; note = 2'-O-methylcytidine-3'-phosphate
  modified_base 17: mod_base = OTHER; note = 2'-deoxy-2'-fluorocytidine-3'-phosphate
  modified_base 18: mod_base = OTHER; note = 2'-O-methyladenosine-3'-phosphate
  modified_base 19: mod_base = OTHER; note = 2'-deoxy-2'-fluorouridine-3'-phosphate
  modified_base 20: mod_base = OTHER; note = 2'-O-methyladenosine-3'-phosphate
  modified_base 21: mod_base = OTHER; note = 2'-deoxy-2'-fluoroadenosine
tcttaaagactttgtccataa

SEQ ID NO: 864 - RNA, 21 nt, synthetic construct
  source 1..21: mol_type = other RNA
  modified_base 1: mod_base = OTHER; note = 2'-deoxy-2'-fluoroadenosine-3'-phosphate
  modified_base 2: mod_base = OTHER; note = 2'-O-methyladenosine-3'-phosphate
  modified_base 3: mod_base = OTHER; note = 2'-deoxy-2'-fluorocytidine-3'-phosphate
  modified_base 4: mod_base = OTHER; note = 2'-O-methyladenosine-3'-phosphate
  modified_base 5: mod_base = OTHER; note = 2'-deoxy-2'-fluorouridine-3'-phosphate
  modified_base 6: mod_base = OTHER; note = 2'-O-methyladenosine-3'-phosphate
  modified_base 7: mod_base = OTHER; note = 2'-deoxy-2'-fluorouridine-3'-phosphate
  modified_base 8: mod_base = OTHER; note = 2'-O-methyluridine-3'-phosphate
  modified_base 9: mod_base = OTHER; note = 2'-deoxy-2'-fluorouridine-3'-phosphate
  modified_base 10: mod_base = OTHER; note = 2'-deoxy-2'-fluoroguanosine-3'-phosphate
  modified_base 11: mod_base = OTHER; note = 2'-deoxy-2'-fluoroadenosine-3'-phosphate
  modified_base 12: mod_base = OTHER; note = 2'-O-methyluridine-3'-phosphate
  modified_base 13: mod_base = OTHER; note = 2'-deoxy-2'-fluorocytidine-3'-phosphate
  modified_base 14: mod_base = OTHER; note = 2'-O-methyladenosine-3'-phosphate
  modified_base 15: mod_base = OTHER; note = 2'-deoxy-2'-fluoroguanosine-3'-phosphate
  modified_base 16: mod_base = OTHER; note = 2'-O-methyluridine-3'-phosphate
  modified_base 17: mod_base = OTHER; note = 2'-deoxy-2'-fluorocytidine-3'-phosphate
  modified_base 18: mod_base = OTHER; note = 2'-O-methyluridine-3'-phosphate
  modified_base 19: mod_base = OTHER; note = 2'-deoxy-2'-fluorouridine-3'-phosphate
  modified_base 20: mod_base = OTHER; note = 2'-O-methyluridine-3'-phosphate
  modified_base 21: mod_base = OTHER; note = 2'-deoxy-2'-fluorouridine
aacatatttgatcagtctttt

SEQ ID NO: 865 - RNA, 21 nt, synthetic construct
  source 1..21: mol_type = other RNA
  modified_base 1: mod_base = OTHER; note = 2'-deoxy-2'-fluorocytidine-3'-phosphate
  modified_base 2: mod_base = OTHER; note = 2'-O-methyluridine-3'-phosphate
  modified_base 3: mod_base = OTHER; note = 2'-deoxy-2'-fluoroguanosine-3'-phosphate
  modified_base 4: mod_base = OTHER; note = 2'-O-methyladenosine-3'-phosphate
  modified_base 5: mod_base = OTHER; note = 2'-deoxy-2'-fluoroguanosine-3'-phosphate
  modified_base 6: mod_base = OTHER; note = 2'-O-methyladenosine-3'-phosphate
  modified_base 7: mod_base = OTHER; note = 2'-deoxy-2'-fluoroadenosine-3'-phosphate
  modified_base 8: mod_base = OTHER; note = 2'-O-methylguanosine-3'-phosphate
  modified_base 9: mod_base = OTHER; note = 2'-deoxy-2'-fluoroadenosine-3'-phosphate
  modified_base 10: mod_base = OTHER; note = 2'-deoxy-2'-fluoroadenosine-3'-phosphate
  modified_base 11: mod_base = OTHER; note = 2'-deoxy-2'-fluorocytidine-3'-phosphate
  modified_base 12: mod_base = OTHER; note = 2'-O-methyluridine-3'-phosphate
  modified_base 13: mod_base = OTHER; note = 2'-deoxy-2'-fluoroadenosine-3'-phosphate
  modified_base 14: mod_base = OTHER; note = 2'-O-methylcytidine-3'-phosphate
  modified_base 15: mod_base = OTHER; note = 2'-deoxy-2'-fluoroadenosine-3'-phosphate
  modified_base 16: mod_base = OTHER; note = 2'-O-methyluridine-3'-phosphate
  modified_base 17: mod_base = OTHER; note = 2'-deoxy-2'-fluoroadenosine-3'-phosphate
  modified_base 18: mod_base = OTHER; note = 2'-O-methyluridine-3'-phosphate
  modified_base 19: mod_base = OTHER; note = 2'-deoxy-2'-fluoroadenosine-3'-phosphate
  modified_base 20: mod_base = OTHER; note = 2'-O-methyladenosine-3'-phosphate
  modified_base 21: mod_base = OTHER; note = 2'-deoxy-2'-fluoroadenosine
ctgagaagaactacatataaa

SEQ ID NO: 866 - RNA, 21 nt, synthetic construct
  source 1..21: mol_type = other RNA
  modified_base 1: mod_base = OTHER; note = 2'-deoxy-2'-fluoroadenosine-3'-phosphate
  modified_base 2: mod_base = OTHER; note = 2'-O-methyladenosine-3'-phosphate
  modified_base 3: mod_base = OTHER; note = 2'-deoxy-2'-fluorouridine-3'-phosphate
  modified_base 4: mod_base = OTHER; note = 2'-O-methyluridine-3'-phosphate
  modified_base 5: mod_base = OTHER; note = 2'-deoxy-2'-fluoroadenosine-3'-phosphate
  modified_base 6: mod_base = OTHER; note = 2'-O-methyladenosine-3'-phosphate
  modified_base 7: mod_base = OTHER; note = 2'-deoxy-2'-fluoroguanosine-3'-phosphate
  modified_base 8: mod_base = OTHER; note = 2'-O-methylcytidine-3'-phosphate
  modified_base 9: mod_base = OTHER; note = 2'-deoxy-2'-fluorouridine-3'-phosphate
  modified_base 10: mod_base = OTHER; note = 2'-deoxy-2'-fluorocytidine-3'-phosphate
  modified_base 11: mod_base = OTHER; note = 2'-deoxy-2'-fluorocytidine-3'-phosphate
  modified_base 12: mod_base = OTHER; note = 2'-O-methyluridine-3'-phosphate
  modified_base 13: mod_base = OTHER; note = 2'-deoxy-2'-fluorouridine-3'-phosphate
  modified_base 14: mod_base = OTHER; note = 2'-O-methylcytidine-3'-phosphate
  modified_base 15: mod_base = OTHER; note = 2'-deoxy-2'-fluorouridine-3'-phosphate
  modified_base 16: mod_base = OTHER; note = 2'-O-methyluridine-3'-phosphate
  modified_base 17: mod_base = OTHER; note = 2'-deoxy-2'-fluorouridine-3'-phosphate
  modified_base 18: mod_base = OTHER; note = 2'-O-methyluridine-3'-phosphate
  modified_base 19: mod_base = OTHER; note = 2'-deoxy-2'-fluorouridine-3'-phosphate
  modified_base 20: mod_base = OTHER; note = 2'-O-methyladenosine-3'-phosphate
  modified_base 21: mod_base = OTHER; note = 2'-deoxy-2'-fluorouridine
aattaagctccttctttttat

SEQ ID NO: 867 - RNA, 21 nt, synthetic construct
  source 1..21: mol_type = other RNA
  modified_base 1: mod_base = OTHER; note = 2'-deoxy-2'-fluoroadenosine-3'-phosphate
  modified_base 2: mod_base = OTHER; note = 2'-O-methyladenosine-3'-phosphate
  modified_base 3: mod_base = OTHER; note = 2'-deoxy-2'-fluoroadenosine-3'-phosphate
  modified_base 4: mod_base = OTHER; note = 2'-O-methyluridine-3'-phosphate
  modified_base 5: mod_base = OTHER; note = 2'-deoxy-2'-fluorocytidine-3'-phosphate
  modified_base 6: mod_base = OTHER; note = 2'-O-methyladenosine-3'-phosphate
  modified_base 7: mod_base = OTHER; note = 2'-deoxy-2'-fluoroadenosine-3'-phosphate
  modified_base 8: mod_base = OTHER; note = 2'-O-methylguanosine-3'-phosphate
  modified_base 9: mod_base = OTHER; note = 2'-deoxy-2'-fluoroadenosine-3'-phosphate
  modified_base 10: mod_base = OTHER; note = 2'-deoxy-2'-fluorouridine-3'-phosphate
  modified_base 11: mod_base = OTHER; note = 2'-deoxy-2'-fluorouridine-3'-phosphate
  modified_base 12: mod_base = OTHER; note = 2'-O-methyluridine-3'-phosphate
  modified_base 13: mod_base = OTHER; note = 2'-deoxy-2'-fluoroguanosine-3'-phosphate
  modified_base 14: mod_base = OTHER; note = 2'-O-methylcytidine-3'-phosphate
  modified_base 15: mod_base = OTHER; note = 2'-deoxy-2'-fluorouridine-3'-phosphate
  modified_base 16: mod_base = OTHER; note = 2'-O-methyladenosine-3'-phosphate
  modified_base 17: mod_base = OTHER; note = 2'-deoxy-2'-fluorouridine-3'-phosphate
  modified_base 18: mod_base = OTHER; note = 2'-O-methylguanosine-3'-phosphate
  modified_base 19: mod_base = OTHER; note = 2'-deoxy-2'-fluorouridine-3'-phosphate
  modified_base 20: mod_base = OTHER; note = 2'-O-methyluridine-3'-phosphate
  modified_base 21: mod_base = OTHER; note = 2'-deoxy-2'-fluoroadenosine
aaatcaagatttgctatgtta

SEQ ID NO: 868 - RNA, 21 nt, synthetic construct
  source 1..21: mol_type = other RNA
  modified_base 1: mod_base = OTHER; note = 2'-deoxy-2'-fluorouridine-3'-phosphate
  modified_base 2: mod_base = OTHER; note = 2'-O-methyluridine-3'-phosphate
  modified_base 3: mod_base = OTHER; note = 2'-deoxy-2'-fluorocytidine-3'-phosphate
  modified_base 4: mod_base = OTHER; note = 2'-O-methyladenosine-3'-phosphate
  modified_base 5: mod_base = OTHER; note = 2'-deoxy-2'-fluoroguanosine-3'-phosphate
  modified_base 6: mod_base = OTHER; note = 2'-O-methyluridine-3'-phosphate
  modified_base 7: mod_base = OTHER; note = 2'-deoxy-2'-fluorouridine-3'-phosphate
  modified_base 8: mod_base = OTHER; note = 2'-O-methylguanosine-3'-phosphate
  modified_base 9: mod_base = OTHER; note = 2'-deoxy-2'-fluoroguanosine-3'-phosphate
  modified_base 10: mod_base = OTHER; note = 2'-deoxy-2'-fluoroguanosine-3'-phosphate
  modified_base 11: mod_base = OTHER; note = 2'-deoxy-2'-fluoroadenosine-3'-phosphate
  modified_base 12: mod_base = OTHER; note = 2'-O-methylcytidine-3'-phosphate
  modified_base 13: mod_base = OTHER; note = 2'-deoxy-2'-fluoroadenosine-3'-phosphate
  modified_base 14: mod_base = OTHER; note = 2'-O-methyluridine-3'-phosphate
  modified_base 15: mod_base = OTHER; note = 2'-deoxy-2'-fluoroguanosine-3'-phosphate
  modified_base 16: mod_base = OTHER; note = 2'-O-methylguanosine-3'-phosphate
  modified_base 17: mod_base = OTHER; note = 2'-deoxy-2'-fluorouridine-3'-phosphate
  modified_base 18: mod_base = OTHER; note = 2'-O-methylcytidine-3'-phosphate
  modified_base 19: mod_base = OTHER; note = 2'-deoxy-2'-fluorouridine-3'-phosphate
  modified_base 20: mod_base = OTHER; note = 2'-O-methyluridine-3'-phosphate
  modified_base 21: mod_base = OTHER; note = 2'-deoxy-2'-fluoroadenosine
ttcagttgggacatggtctta

SEQ ID NO: 869 - RNA, 21 nt, synthetic construct
  source 1..21: mol_type = other RNA
  modified_base 1: mod_base = OTHER; note = 2'-deoxy-2'-fluoroguanosine-3'-phosphate
  modified_base 2: mod_base = OTHER; note = 2'-O-methylguanosine-3'-phosphate
  modified_base 3: mod_base = OTHER; note = 2'-deoxy-2'-fluoroguanosine-3'-phosphate
  modified_base 4: mod_base = OTHER; note = 2'-O-methylcytidine-3'-phosphate
  modified_base 5: mod_base = OTHER; note = 2'-deoxy-2'-fluorocytidine-3'-phosphate
  modified_base 6: mod_base = OTHER; note = 2'-O-methyladenosine-3'-phosphate
  modified_base 7: mod_base = OTHER; note = 2'-deoxy-2'-fluoroadenosine-3'-phosphate
  modified_base 8: mod_base = OTHER; note = 2'-O-methyladenosine-3'-phosphate
  modified_base 9: mod_base = OTHER; note = 2'-deoxy-2'-fluorouridine-3'-phosphate
  modified_base 10: mod_base = OTHER; note = 2'-deoxy-2'-fluorouridine-3'-phosphate
  modified_base 11: mod_base = OTHER; note = 2'-deoxy-2'-fluoroadenosine-3'-phosphate
  modified_base 12: mod_base = OTHER; note = 2'-O-methyladenosine-3'-phosphate
  modified_base 13: mod_base = OTHER; note = 2'-deoxy-2'-fluorouridine-3'-phosphate
  modified_base 14: mod_base = OTHER; note = 2'-O-methylguanosine-3'-phosphate
  modified_base 15: mod_base = OTHER; note = 2'-deoxy-2'-fluoroadenosine-3'-phosphate
  modified_base 16: mod_base = OTHER; note = 2'-O-methylcytidine-3'-phosphate
  modified_base 17: mod_base = OTHER; note = 2'-deoxy-2'-fluoroadenosine-3'-phosphate
  modified_base 18: mod_base = OTHER; note = 2'-O-methyluridine-3'-phosphate
  modified_base 19: mod_base = OTHER; note = 2'-deoxy-2'-fluoroadenosine-3'-phosphate
  modified_base 20: mod_base = OTHER; note = 2'-O-methyluridine-3'-phosphate
  modified_base 21: mod_base = OTHER; note = 2'-deoxy-2'-fluorouridine
gggccaaattaatgacatatt

SEQ ID NO: 870 - RNA, 21 nt, synthetic construct
  source 1..21: mol_type = other RNA
  modified_base 1: mod_base = OTHER; note = 2'-deoxy-2'-fluoroadenosine-3'-phosphate
  modified_base 2: mod_base = OTHER; note = 2'-O-methylcytidine-3'-phosphate
  modified_base 3: mod_base = OTHER; note = 2'-deoxy-2'-fluoroadenosine-3'-phosphate
  modified_base 4: mod_base = OTHER; note = 2'-O-methyluridine-3'-phosphate
  modified_base 5: mod_base = OTHER; note = 2'-deoxy-2'-fluoroadenosine-3'-phosphate
  modified_base 6: mod_base = OTHER; note = 2'-O-methyluridine-3'-phosphate
  modified_base 7: mod_base = OTHER; note = 2'-deoxy-2'-fluorouridine-3'-phosphate
  modified_base 8: mod_base = OTHER; note = 2'-O-methyluridine-3'-phosphate
  modified_base 9: mod_base = OTHER; note = 2'-deoxy-2'-fluoroguanosine-3'-phosphate
  modified_base 10: mod_base = OTHER; note = 2'-deoxy-2'-fluoroadenosine-3'-phosphate
  modified_base 11: mod_base = OTHER; note = 2'-deoxy-2'-fluorouridine-3'-phosphate
  modified_base 12: mod_base = OTHER; note = 2'-O-methylcytidine-3'-phosphate
  modified_base 13: mod_base = OTHER; note = 2'-deoxy-2'-fluoroadenosine-3'-phosphate
  modified_base 14: mod_base = OTHER; note = 2'-O-methylguanosine-3'-phosphate
  modified_base 15: mod_base = OTHER; note = 2'-deoxy-2'-fluorouridine-3'-phosphate
  modified_base 16: mod_base = OTHER; note = 2'-O-methylcytidine-3'-phosphate
  modified_base 17: mod_base = OTHER; note = 2'-deoxy-2'-fluorouridine-3'-phosphate
  modified_base 18: mod_base = OTHER; note = 2'-O-methyluridine-3'-phosphate
  modified_base 19: mod_base = OTHER; note = 2'-deoxy-2'-fluorouridine-3'-phosphate
  modified_base 20: mod_base = OTHER; note = 2'-O-methyluridine-3'-phosphate
  modified_base 21: mod_base = OTHER; note = 2'-deoxy-2'-fluorouridine
acatatttgatcagtcttttt

SEQ ID NO: 871 - RNA, 21 nt, synthetic construct
  source 1..21: mol_type = other RNA
  modified_base 1: mod_base = OTHER; note = 2'-deoxy-2'-fluoroadenosine-3'-phosphate
  modified_base 2: mod_base = OTHER; note = 2'-O-methylguanosine-3'-phosphate
  modified_base 3: mod_base = OTHER; note = 2'-deoxy-2'-fluoroadenosine-3'-phosphate
  modified_base 4: mod_base = OTHER; note = 2'-O-methyladenosine-3'-phosphate
  modified_base 5: mod_base = OTHER; note = 2'-deoxy-2'-fluorocytidine-3'-phosphate
  modified_base 6: mod_base = OTHER; note = 2'-O-methyluridine-3'-phosphate
  modified_base 7: mod_base = OTHER; note = 2'-deoxy-2'-fluoroadenosine-3'-phosphate
  modified_base 8: mod_base = OTHER; note = 2'-O-methylcytidine-3'-phosphate
  modified_base 9: mod_base = OTHER; note = 2'-deoxy-2'-fluoroadenosine-3'-phosphate
  modified_base 10: mod_base = OTHER; note = 2'-deoxy-2'-fluorouridine-3'-phosphate
  modified_base 11: mod_base = OTHER; note = 2'-deoxy-2'-fluoroadenosine-3'-phosphate
  modified_base 12: mod_base = OTHER; note = 2'-O-methyluridine-3'-phosphate
  modified_base 13: mod_base = OTHER; note = 2'-deoxy-2'-fluoroadenosine-3'-phosphate
  modified_base 14: mod_base = OTHER; note = 2'-O-methyladenosine-3'-phosphate
  modified_base 15: mod_base = OTHER; note = 2'-deoxy-2'-fluoroadenosine-3'-phosphate
  modified_base 16: mod_base = OTHER; note = 2'-O-methylcytidine-3'-phosphate
  modified_base 17: mod_base = OTHER; note = 2'-deoxy-2'-fluorouridine-3'-phosphate
  modified_base 18: mod_base = OTHER; note = 2'-O-methyladenosine-3'-phosphate
  modified_base 19: mod_base = OTHER; note = 2'-deoxy-2'-fluorocytidine-3'-phosphate
  modified_base 20: mod_base = OTHER; note = 2'-O-methyladenosine-3'-phosphate
  modified_base 21: mod_base = OTHER; note = 2'-deoxy-2'-fluoroadenosine
agaactacatataaactacaa

SEQ ID NO: 872 - RNA, 21 nt, synthetic construct
  source 1..21: mol_type = other RNA
  modified_base 1: mod_base = OTHER; note = 2'-deoxy-2'-fluoroadenosine-3'-phosphate
  modified_base 2: mod_base = OTHER; note = 2'-O-methyluridine-3'-phosphate
  modified_base 3: mod_base = OTHER; note = 2'-deoxy-2'-fluorouridine-3'-phosphate
  modified_base 4: mod_base = OTHER; note = 2'-O-methyladenosine-3'-phosphate
  modified_base 5: mod_base = OTHER; note = 2'-deoxy-2'-fluoroadenosine-3'-phosphate
  modified_base 6: mod_base = OTHER; note = 2'-O-methylguanosine-3'-phosphate
  modified_base 7: mod_base = OTHER; note = 2'-deoxy-2'-fluorocytidine-3'-phosphate
  modified_base 8: mod_base = OTHER; note = 2'-O-methyluridine-3'-phosphate
  modified_base 9: mod_base = OTHER; note = 2'-deoxy-2'-fluorocytidine-3'-phosphate
  modified_base 10: mod_base = OTHER; note = 2'-deoxy-2'-fluorocytidine-3'-phosphate
  modified_base 11: mod_base = OTHER; note = 2'-deoxy-2'-fluorouridine-3'-phosphate
  modified_base 12: mod_base = OTHER; note = 2'-O-methyluridine-3'-phosphate
  modified_base 13: mod_base = OTHER; note = 2'-deoxy-2'-fluorocytidine-3'-phosphate
  modified_base 14: mod_base = OTHER; note = 2'-O-methyluridine-3'-phosphate
  modified_base 15: mod_base = OTHER; note = 2'-deoxy-2'-fluorouridine-3'-phosphate
  modified_base 16: mod_base = OTHER; note = 2'-O-methyluridine-3'-phosphate
  modified_base 17: mod_base = OTHER; note = 2'-deoxy-2'-fluorouridine-3'-phosphate
  modified_base 18: mod_base = OTHER; note = 2'-O-methyluridine-3'-phosphate
  modified_base 19: mod_base = OTHER; note = 2'-deoxy-2'-fluoroadenosine-3'-phosphate
  modified_base 20: mod_base = OTHER; note = 2'-O-methyluridine-3'-phosphate
  modified_base 21: mod_base = OTHER; note = 2'-deoxy-2'-fluorouridine
attaagctccttctttttatt

SEQ ID NO: 873 - RNA, 21 nt, synthetic construct
  source 1..21: mol_type = other RNA
  modified_base 1: mod_base = OTHER; note = 2'-deoxy-2'-fluoroadenosine-3'-phosphate
  modified_base 2: mod_base = OTHER; note = 2'-O-methylguanosine-3'-phosphate
  modified_base 3: mod_base = OTHER; note = 2'-deoxy-2'-fluoroadenosine-3'-phosphate
  modified_base 4: mod_base = OTHER; note = 2'-O-methyluridine-3'-phosphate
  modified_base 5: mod_base = OTHER; note = 2'-deoxy-2'-fluorouridine-3'-phosphate
  modified_base 6: mod_base = OTHER; note = 2'-O-methyluridine-3'-phosphate
  modified_base 7: mod_base = OTHER; note = 2'-deoxy-2'-fluoroguanosine-3'-phosphate
  modified_base 8: mod_base = OTHER; note = 2'-O-methylcytidine-3'-phosphate
  modified_base 9: mod_base = OTHER; note = 2'-deoxy-2'-fluorouridine-3'-phosphate
  modified_base 10: mod_base = OTHER; note = 2'-deoxy-2'-fluoroadenosine-3'-phosphate
  modified_base 11: mod_base = OTHER; note = 2'-deoxy-2'-fluorouridine-3'-phosphate
  modified_base 12: mod_base = OTHER; note = 2'-O-methylguanosine-3'-phosphate
  modified_base 13: mod_base = OTHER; note = 2'-deoxy-2'-fluorouridine-3'-phosphate
  modified_base 14: mod_base = OTHER; note = 2'-O-methyluridine-3'-phosphate
  modified_base 15: mod_base = OTHER; note = 2'-deoxy-2'-fluoroadenosine-3'-phosphate
  modified_base 16: mod_base = OTHER; note = 2'-O-methylguanosine-3'-phosphate
  modified_base 17: mod_base = OTHER; note = 2'-deoxy-2'-fluoroadenosine-3'-phosphate
  modified_base 18: mod_base = OTHER; note = 2'-O-methylcytidine-3'-phosphate
  modified_base 19: mod_base = OTHER; note = 2'-deoxy-2'-fluoroguanosine-3'-phosphate
  modified_base 20: mod_base = OTHER; note = 2'-O-methyladenosine-3'-phosphate
  modified_base 21: mod_base = OTHER; note = 2'-deoxy-2'-fluorouridine
agatttgctatgttagacgat

SEQ ID NO: 874 - RNA, 21 nt, synthetic construct
  source 1..21: mol_type = other RNA
  modified_base 1: mod_base = OTHER; note = 2'-deoxy-2'-fluorouridine-3'-phosphate
  modified_base 2: mod_base = OTHER; note = 2'-O-methylcytidine-3'-phosphate
  modified_base 3: mod_base = OTHER; note = 2'-deoxy-2'-fluoroadenosine-3'-phosphate
  modified_base 4: mod_base = OTHER; note = 2'-O-methylguanosine-3'-phosphate
  modified_base 5: mod_base = OTHER; note = 2'-deoxy-2'-fluorouridine-3'-phosphate
  modified_base 6: mod_base = OTHER; note = 2'-O-methyluridine-3'-phosphate
  modified_base 7: mod_base = OTHER; note = 2'-deoxy-2'-fluoroguanosine-3'-phosphate
  modified_base 8: mod_base = OTHER; note = 2'-O-methylguanosine-3'-phosphate
  modified_base 9: mod_base = OTHER; note = 2'-deoxy-2'-fluoroguanosine-3'-phosphate
  modified_base 10: mod_base = OTHER; note = 2'-deoxy-2'-fluoroadenosine-3'-phosphate
  modified_base 11: mod_base = OTHER; note = 2'-deoxy-2'-fluorocytidine-3'-phosphate
  modified_base 12: mod_base = OTHER; note = 2'-O-methyladenosine-3'-phosphate
  modified_base 13: mod_base = OTHER; note = 2'-deoxy-2'-fluorouridine-3'-phosphate
  modified_base 14: mod_base = OTHER; note = 2'-O-methylguanosine-3'-phosphate
  modified_base 15: mod_base = OTHER; note = 2'-deoxy-2'-fluoroguanosine-3'-phosphate
  modified_base 16: mod_base = OTHER; note = 2'-O-methyluridine-3'-phosphate
  modified_base 17: mod_base = OTHER; note = 2'-deoxy-2'-fluorocytidine-3'-phosphate
  modified_base 18: mod_base = OTHER; note = 2'-O-methyluridine-3'-phosphate
  modified_base 19: mod_base = OTHER; note = 2'-deoxy-2'-fluorouridine-3'-phosphate
  modified_base 20: mod_base = OTHER; note = 2'-O-methyladenosine-3'-phosphate
  modified_base 21: mod_base = OTHER; note = 2'-deoxy-2'-fluoroadenosine
tcagttgggacatggtcttaa

SEQ ID NO: 875 - RNA, 21 nt, synthetic construct
  source 1..21: mol_type = other RNA
  modified_base 1: mod_base = OTHER; note = 2'-deoxy-2'-fluoroguanosine-3'-phosphate
  modified_base 2: mod_base = OTHER; note = 2'-O-methylguanosine-3'-phosphate
  modified_base 3: mod_base = OTHER; note = 2'-deoxy-2'-fluorocytidine-3'-phosphate
  modified_base 4: mod_base = OTHER; note = 2'-O-methylcytidine-3'-phosphate
  modified_base 5: mod_base = OTHER; note = 2'-deoxy-2'-fluoroadenosine-3'-phosphate
  modified_base 6: mod_base = OTHER; note = 2'-O-methyladenosine-3'-phosphate
  modified_base 7: mod_base = OTHER; note = 2'-deoxy-2'-fluoroadenosine-3'-phosphate
  modified_base 8: mod_base = OTHER; note = 2'-O-methyluridine-3'-phosphate
  modified_base 9: mod_base = OTHER; note = 2'-deoxy-2'-fluorouridine-3'-phosphate
  modified_base 10: mod_base = OTHER; note = 2'-deoxy-2'-fluoroadenosine-3'-phosphate
  modified_base 11: mod_base = OTHER; note = 2'-deoxy-2'-fluoroadenosine-3'-phosphate
  modified_base 12: mod_base = OTHER; note = 2'-O-methyluridine-3'-phosphate
  modified_base 13: mod_base = OTHER; note = 2'-deoxy-2'-fluoroguanosine-3'-phosphate
  modified_base 14: mod_base = OTHER; note = 2'-O-methyladenosine-3'-phosphate
  modified_base 15: mod_base = OTHER; note = 2'-deoxy-2'-fluorocytidine-3'-phosphate
  modified_base 16: mod_base = OTHER; note = 2'-O-methyladenosine-3'-phosphate
  modified_base 17: mod_base = OTHER; note = 2'-deoxy-2'-fluorouridine-3'-phosphate
  modified_base 18: mod_base = OTHER; note = 2'-O-methyladenosine-3'-phosphate
  modified_base 19: mod_base = OTHER; note = 2'-deoxy-2'-fluorouridine-3'-phosphate
  modified_base 20: mod_base = OTHER; note = 2'-O-methyluridine-3'-phosphate
  modified_base 21: mod_base = OTHER; note = 2'-deoxy-2'-fluorouridine
ggccaaattaatgacatattt

SEQ ID NO: 876 - RNA, 21 nt, synthetic construct
  source 1..21: mol_type = other RNA
  modified_base 1: mod_base = OTHER; note = 2'-deoxy-2'-fluorocytidine-3'-phosphate
  modified_base 2: mod_base = OTHER; note = 2'-O-methyladenosine-3'-phosphate
  modified_base 3: mod_base = OTHER; note = 2'-deoxy-2'-fluorouridine-3'-phosphate
  modified_base 4: mod_base = OTHER; note = 2'-O-methyladenosine-3'-phosphate
  modified_base 5: mod_base = OTHER; note = 2'-deoxy-2'-fluorouridine-3'-phosphate
  modified_base 6: mod_base = OTHER; note = 2'-O-methyluridine-3'-phosphate
  modified_base 7: mod_base = OTHER; note = 2'-deoxy-2'-fluorouridine-3'-phosphate
  modified_base 8: mod_base = OTHER; note = 2'-O-methylguanosine-3'-phosphate
  modified_base 9: mod_base = OTHER; note = 2'-deoxy-2'-fluoroadenosine-3'-phosphate
  modified_base 10: mod_base = OTHER; note = 2'-deoxy-2'-fluorouridine-3'-phosphate
  modified_base 11: mod_base = OTHER; note = 2'-deoxy-2'-fluorocytidine-3'-phosphate
  modified_base 12: mod_base = OTHER; note = 2'-O-methyladenosine-3'-phosphate
  modified_base 13: mod_base = OTHER; note = 2'-deoxy-2'-fluoroguanosine-3'-phosphate
  modified_base 14: mod_base = OTHER; note = 2'-O-methyluridine-3'-phosphate
  modified_base 15: mod_base = OTHER; note = 2'-deoxy-2'-fluorocytidine-3'-phosphate
  modified_base 16: mod_base = OTHER; note = 2'-O-methyluridine-3'-phosphate
  modified_base 17: mod_base = OTHER; note = 2'-deoxy-2'-fluorouridine-3'-phosphate
  modified_base 18: mod_base = OTHER; note = 2'-O-methyluridine-3'-phosphate
  modified_base 19: mod_base = OTHER; note = 2'-deoxy-2'-fluorouridine-3'-phosphate
  modified_base 20: mod_base = OTHER; note = 2'-O-methyluridine-3'-phosphate
  modified_base 21: mod_base = OTHER; note = 2'-deoxy-2'-fluoroadenosine
catatttgatcagtcttttta

SEQ ID NO: 877 - RNA, 21 nt, synthetic construct
  source 1..21: mol_type = other RNA
  modified_base 1: mod_base = OTHER; note = 2'-deoxy-2'-fluorouridine-3'-phosphate
  modified_base 2: mod_base = OTHER; note = 2'-O-methyladenosine-3'-phosphate
  modified_base 3: mod_base = OTHER; note = 2'-deoxy-2'-fluorocytidine-3'-phosphate
  modified_base 4: mod_base = OTHER; note = 2'-O-methyladenosine-3'-phosphate
  modified_base 5: mod_base = OTHER; note = 2'-deoxy-2'-fluorouridine-3'-phosphate
  modified_base 6: mod_base = OTHER; note = 2'-O-methyladenosine-3'-phosphate
  modified_base 7: mod_base = OTHER; note = 2'-deoxy-2'-fluorouridine-3'-phosphate
  modified_base 8: mod_base = OTHER; note = 2'-O-methyladenosine-3'-phosphate
  modified_base 9: mod_base = OTHER; note = 2'-deoxy-2'-fluoroadenosine-3'-phosphate
  modified_base 10: mod_base = OTHER; note = 2'-deoxy-2'-fluoroadenosine-3'-phosphate
  modified_base 11: mod_base = OTHER; note = 2'-deoxy-2'-fluorocytidine-3'-phosphate
  modified_base 12: mod_base = OTHER; note = 2'-O-methyluridine-3'-phosphate
  modified_base 13: mod_base = OTHER; note = 2'-deoxy-2'-fluoroadenosine-3'-phosphate
  modified_base 14: mod_base = OTHER; note = 2'-O-methylcytidine-3'-phosphate
  modified_base 15: mod_base = OTHER; note = 2'-deoxy-2'-fluoroadenosine-3'-phosphate
  modified_base 16: mod_base = OTHER; note = 2'-O-methyladenosine-3'-phosphate
  modified_base 17: mod_base = OTHER; note = 2'-deoxy-2'-fluoroguanosine-3'-phosphate
  modified_base 18: mod_base = OTHER; note = 2'-O-methyluridine-3'-phosphate
  modified_base 19: mod_base = OTHER; note = 2'-deoxy-2'-fluorocytidine-3'-phosphate
  modified_base 20: mod_base = OTHER; note = 2'-O-methyladenosine-3'-phosphate
  modified_base 21: mod_base = OTHER; note = 2'-deoxy-2'-fluoroadenosine
tacatataaactacaagtcaa

SEQ ID NO: 878 - RNA, 21 nt, synthetic construct
  source 1..21: mol_type = other RNA
  modified_base 1: mod_base = OTHER; note = 2'-deoxy-2'-fluorouridine-3'-phosphate
  modified_base 2: mod_base = OTHER; note = 2'-O-methyluridine-3'-phosphate
  modified_base 3: mod_base = OTHER; note = 2'-deoxy-2'-fluorouridine-3'-phosphate
  modified_base 4: mod_base = OTHER; note = 2'-O-methyluridine-3'-phosphate
  modified_base 5: mod_base = OTHER; note = 2'-deoxy-2'-fluoroadenosine-3'-phosphate
  modified_base 6: mod_base = OTHER; note = 2'-O-methyluridine-3'-phosphate
  modified_base 7: mod_base = OTHER; note = 2'-deoxy-2'-fluorouridine-3'-phosphate
  modified_base 8: mod_base = OTHER; note = 2'-O-methylguanosine-3'-phosphate
  modified_base 9: mod_base = OTHER; note = 2'-deoxy-2'-fluorouridine-3'-phosphate
  modified_base 10: mod_base = OTHER; note = 2'-deoxy-2'-fluorouridine-3'-phosphate
  modified_base 11: mod_base = OTHER; note = 2'-deoxy-2'-fluorocytidine-3'-phosphate
  modified_base 12: mod_base = OTHER; note = 2'-O-methylcytidine-3'-phosphate
  modified_base 13: mod_base = OTHER; note = 2'-deoxy-2'-fluorouridine-3'-phosphate
  modified_base 14: mod_base = OTHER; note = 2'-O-methylcytidine-3'-phosphate
  modified_base 15: mod_base = OTHER; note = 2'-deoxy-2'-fluorouridine-3'-phosphate
  modified_base 16: mod_base = OTHER; note = 2'-O-methyladenosine-3'-phosphate
  modified_base 17: mod_base = OTHER; note = 2'-deoxy-2'-fluoroguanosine-3'-phosphate
  modified_base 18: mod_base = OTHER; note = 2'-O-methyluridine-3'-phosphate
  modified_base 19: mod_base = OTHER; note = 2'-deoxy-2'-fluorouridine-3'-phosphate
  modified_base 20: mod_base = OTHER; note = 2'-O-methyladenosine-3'-phosphate
  modified_base 21: mod_base = OTHER; note = 2'-deoxy-2'-fluorouridine
ttttattgttcctctagttat

SEQ ID NO: 879 - RNA, 21 nt, synthetic construct
  source 1..21: mol_type = other RNA
  modified_base 1: mod_base = OTHER; note = 2'-deoxy-2'-fluorouridine-3'-phosphate
  modified_base 2: mod_base = OTHER; note = 2'-O-methyluridine-3'-phosphate
  modified_base 3: mod_base = OTHER; note = 2'-deoxy-2'-fluoroguanosine-3'-phosphate
  modified_base 4: mod_base = OTHER; note = 2'-O-methylcytidine-3'-phosphate
  modified_base 5: mod_base = OTHER; note = 2'-deoxy-2'-fluorouridine-3'-phosphate
  modified_base 6: mod_base = OTHER; note = 2'-O-methyladenosine-3'-phosphate
  modified_base 7: mod_base = OTHER; note = 2'-deoxy-2'-fluorouridine-3'-phosphate
  modified_base 8: mod_base = OTHER; note = 2'-O-methylguanosine-3'-phosphate
  modified_base 9: mod_base = OTHER; note = 2'-deoxy-2'-fluorouridine-3'-phosphate
  modified_base 10: mod_base = OTHER; note = 2'-deoxy-2'-fluorouridine-3'-phosphate
  modified_base 11: mod_base = OTHER; note = 2'-deoxy-2'-fluoroadenosine-3'-phosphate
  modified_base 12: mod_base = OTHER; note = 2'-O-methylguanosine-3'-phosphate
  modified_base 13: mod_base = OTHER; note = 2'-deoxy-2'-fluoroadenosine-3'-phosphate
  modified_base 14: mod_base = OTHER; note = 2'-O-methylcytidine-3'-phosphate
  modified_base 15: mod_base = OTHER; note = 2'-deoxy-2'-fluoroguanosine-3'-phosphate
  modified_base 16: mod_base = OTHER; note = 2'-O-methyladenosine-3'-phosphate
  modified_base 17: mod_base = OTHER; note = 2'-deoxy-2'-fluorouridine-3'-phosphate
  modified_base 18: mod_base = OTHER; note = 2'-O-methylguanosine-3'-phosphate
  modified_base 19: mod_base = OTHER; note = 2'-deoxy-2'-fluorouridine-3'-phosphate
  modified_base 20: mod_base = OTHER; note = 2'-O-methyladenosine-3'-phosphate
  modified_base 21: mod_base = OTHER; note = 2'-deoxy-2'-fluoroadenosine
ttgctatgttagacgatgtaa

SEQ ID NO: 880 - RNA, 21 nt, synthetic construct
  source 1..21: mol_type = other RNA
  modified_base 1: mod_base = OTHER; note = 2'-deoxy-2'-fluorocytidine-3'-phosphate
  modified_base 2: mod_base = OTHER; note = 2'-O-methyladenosine-3'-phosphate
  modified_base 3: mod_base = OTHER; note = 2'-deoxy-2'-fluoroguanosine-3'-phosphate
  modified_base 4: mod_base = OTHER; note = 2'-O-methyluridine-3'-phosphate
  modified_base 5: mod_base = OTHER; note = 2'-deoxy-2'-fluorouridine-3'-phosphate
  modified_base 6: mod_base = OTHER; note = 2'-O-methylguanosine-3'-phosphate
  modified_base 7: mod_base = OTHER; note = 2'-deoxy-2'-fluoroguanosine-3'-phosphate
  modified_base 8: mod_base = OTHER; note = 2'-O-methylguanosine-3'-phosphate
  modified_base 9: mod_base = OTHER; note = 2'-deoxy-2'-fluoroadenosine-3'-phosphate
  modified_base 10: mod_base = OTHER; note = 2'-deoxy-2'-fluorocytidine-3'-phosphate
  modified_base 11: mod_base = OTHER; note = 2'-deoxy-2'-fluoroadenosine-3'-phosphate
  modified_base 12: mod_base = OTHER; note = 2'-O-methyluridine-3'-phosphate
  modified_base 13: mod_base = OTHER; note = 2'-deoxy-2'-fluoroguanosine-3'-phosphate
  modified_base 14: mod_base = OTHER; note = 2'-O-methylguanosine-3'-phosphate
  modified_base 15: mod_base = OTHER; note = 2'-deoxy-2'-fluorouridine-3'-phosphate
  modified_base 16: mod_base = OTHER; note = 2'-O-methylcytidine-3'-phosphate
  modified_base 17: mod_base = OTHER; note = 2'-deoxy-2'-fluorouridine-3'-phosphate
  modified_base 18: mod_base = OTHER; note = 2'-O-methyluridine-3'-phosphate
  modified_base 19: mod_base = OTHER; note = 2'-deoxy-2'-fluoroadenosine-3'-phosphate
  modified_base 20: mod_base = OTHER; note = 2'-O-methyladenosine-3'-phosphate
  modified_base 21: mod_base = OTHER; note = 2'-deoxy-2'-fluoroadenosine
cagttgggacatggtcttaaa

SEQ ID NO: 881 - RNA, 21 nt, synthetic construct
  source 1..21: mol_type = other RNA
  modified_base 1: mod_base = OTHER; note = 2'-deoxy-2'-fluoroadenosine-3'-phosphate
  modified_base 2: mod_base = OTHER; note = 2'-O-methyladenosine-3'-phosphate
  modified_base 3: mod_base = OTHER; note = 2'-deoxy-2'-fluoroadenosine-3'-phosphate
  modified_base 4: mod_base = OTHER; note = 2'-O-methyluridine-3'-phosphate
  modified_base 5: mod_base = OTHER; note = 2'-deoxy-2'-fluorouridine-3'-phosphate
  modified_base 6: mod_base = OTHER; note = 2'-O-methyladenosine-3'-phosphate
  modified_base 7: mod_base = OTHER; note = 2'-deoxy-2'-fluoroadenosine-3'-phosphate
  modified_base 8: mod_base = OTHER; note = 2'-O-methyluridine-3'-phosphate
  modified_base 9: mod_base = OTHER; note = 2'-deoxy-2'-fluoroguanosine-3'-phosphate
  modified_base 10: mod_base = OTHER; note = 2'-deoxy-2'-fluoroadenosine-3'-phosphate
  modified_base 11: mod_base = OTHER; note = 2'-deoxy-2'-fluorocytidine-3'-phosphate
  modified_base 12: mod_base = OTHER; note = 2'-O-methyladenosine-3'-phosphate
  modified_base 13: mod_base = OTHER; note = 2'-deoxy-2'-fluorouridine-3'-phosphate
  modified_base 14: mod_base = OTHER; note = 2'-O-methyladenosine-3'-phosphate
  modified_base 15: mod_base = OTHER; note = 2'-deoxy-2'-fluorouridine-3'-phosphate
  modified_base 16: mod_base = OTHER; note = 2'-O-methyluridine-3'-phosphate
  modified_base 17: mod_base = OTHER; note = 2'-deoxy-2'-fluorouridine-3'-phosphate
  modified_base 18: mod_base = OTHER; note = 2'-O-methylcytidine-3'-phosphate
  modified_base 19: mod_base = OTHER; note = 2'-deoxy-2'-fluoroadenosine-3'-phosphate
  modified_base 20: mod_base = OTHER; note = 2'-O-methyladenosine-3'-phosphate
  modified_base 21: mod_base = OTHER; note = 2'-deoxy-2'-fluoroadenosine
aaattaatgacatatttcaaa

SEQ ID NO: 882 - RNA, 21 nt, synthetic construct
  source 1..21: mol_type = other RNA
  modified_base 1: mod_base = OTHER; note = 2'-deoxy-2'-fluoroguanosine-3'-phosphate
  modified_base 2: mod_base = OTHER; note = 2'-O-methyladenosine-3'-phosphate
  modified_base 3: mod_base = OTHER; note = 2'-deoxy-2'-fluorouridine-3'-phosphate
  modified_base 4: mod_base = OTHER; note = 2'-O-methylcytidine-3'-phosphate
  modified_base 5: mod_base = OTHER; note = 2'-deoxy-2'-fluoroadenosine-3'-phosphate
  modified_base 6: mod_base = OTHER; note = 2'-O-methylguanosine-3'-phosphate
  modified_base 7: mod_base = OTHER; note = 2'-deoxy-2'-fluorouridine-3'-phosphate
  modified_base 8: mod_base = OTHER; note = 2'-O-methylcytidine-3'-phosphate
  modified_base 9: mod_base = OTHER; note = 2'-deoxy-2'-fluorouridine-3'-phosphate
  modified_base 10: mod_base = OTHER; note = 2'-deoxy-2'-fluorouridine-3'-phosphate
  modified_base 11: mod_base = OTHER; note = 2'-deoxy-2'-fluorouridine-3'-phosphate
  modified_base 12: mod_base = OTHER; note = 2'-O-methyluridine-3'-phosphate
  modified_base 13: mod_base = OTHER; note = 2'-deoxy-2'-fluorouridine-3'-phosphate
  modified_base 14: mod_base = OTHER; note = 2'-O-methyladenosine-3'-phosphate
  modified_base 15: mod_base = OTHER; note = 2'-deoxy-2'-fluorouridine-3'-phosphate
  modified_base 16: mod_base = OTHER; note = 2'-O-methylguanosine-3'-phosphate
  modified_base 17: mod_base = OTHER; note = 2'-deoxy-2'-fluoroadenosine-3'-phosphate
  modified_base 18: mod_base = OTHER; note = 2'-O-methyluridine-3'-phosphate
  modified_base 19: mod_base = OTHER; note = 2'-deoxy-2'-fluorocytidine-3'-phosphate
  modified_base 20: mod_base = OTHER; note = 2'-O-methyluridine-3'-phosphate
  modified_base 21: mod_base = OTHER; note = 2'-deoxy-2'-fluoroadenosine
gatcagtctttttatgatcta

SEQ ID NO: 883 - RNA, 21 nt, synthetic construct
  source 1..21: mol_type = other RNA
  modified_base 1: mod_base = OTHER; note = 2'-deoxy-2'-fluoroadenosine-3'-phosphate
  modified_base 2: mod_base = OTHER; note = 2'-O-methylcytidine-3'-phosphate
  modified_base 3: mod_base = OTHER; note = 2'-deoxy-2'-fluoroadenosine-3'-phosphate
  modified_base 4: mod_base = OTHER; note = 2'-O-methyluridine-3'-phosphate
  modified_base 5: mod_base = OTHER; note = 2'-deoxy-2'-fluoroadenosine-3'-phosphate
  modified_base 6: mod_base = OTHER; note = 2'-O-methyluridine-3'-phosphate
  modified_base 7: mod_base = OTHER; note = 2'-deoxy-2'-fluoroadenosine-3'-phosphate
  modified_base 8: mod_base = OTHER; note = 2'-O-methyladenosine-3'-phosphate
  modified_base 9: mod_base = OTHER; note = 2'-deoxy-2'-fluoroadenosine-3'-phosphate
  modified_base 10: mod_base = OTHER; note = 2'-deoxy-2'-fluorocytidine-3'-phosphate
  modified_base 11: mod_base = OTHER; note = 2'-deoxy-2'-fluorouridine-3'-phosphate
  modified_base 12: mod_base = OTHER; note = 2'-O-methyladenosine-3'-phosphate
  modified_base 13: mod_base = OTHER; note = 2'-deoxy-2'-fluorocytidine-3'-phosphate
  modified_base 14: mod_base = OTHER; note = 2'-O-methyladenosine-3'-phosphate
  modified_base 15: mod_base = OTHER; note = 2'-deoxy-2'-fluoroadenosine-3'-phosphate
  modified_base 16: mod_base = OTHER; note = 2'-O-methylguanosine-3'-phosphate
  modified_base 17: mod_base = OTHER; note = 2'-deoxy-2'-fluorouridine-3'-phosphate
  modified_base 18: mod_base = OTHER; note = 2'-O-methylcytidine-3'-phosphate
  modified_base 19: mod_base = OTHER; note = 2'-deoxy-2'-fluoroadenosine-3'-phosphate
  modified_base 20: mod_base = OTHER; note = 2'-O-methyladenosine-3'-phosphate
  modified_base 21: mod_base = OTHER; note = 2'-deoxy-2'-fluoroadenosine
acatataaactacaagtcaaa

SEQ ID NO: 884 - RNA, 21 nt, synthetic construct
  source 1..21: mol_type = other RNA
  modified_base 1: mod_base = OTHER; note = 2'-deoxy-2'-fluorouridine-3'-phosphate
  modified_base 2: mod_base = OTHER; note = 2'-O-methyluridine-3'-phosphate
  modified_base 3: mod_base = OTHER; note = 2'-deoxy-2'-fluorouridine-3'-phosphate
  modified_base 4: mod_base = OTHER; note = 2'-O-methyladenosine-3'-phosphate
  modified_base 5: mod_base = OTHER; note = 2'-deoxy-2'-fluorouridine-3'-phosphate
  modified_base 6: mod_base = OTHER; note = 2'-O-methyluridine-3'-phosphate
  modified_base 7: mod_base = OTHER; note = 2'-deoxy-2'-fluoroguanosine-3'-phosphate
  modified_base 8: mod_base = OTHER; note = 2'-O-methyluridine-3'-phosphate
  modified_base 9: mod_base = OTHER; note = 2'-deoxy-2'-fluorouridine-3'-phosphate
  modified_base 10: mod_base = OTHER; note = 2'-deoxy-2'-fluorocytidine-3'-phosphate
  modified_base 11: mod_base = OTHER; note = 2'-deoxy-2'-fluorocytidine-3'-phosphate
  modified_base 12: mod_base = OTHER; note = 2'-O-methyluridine-3'-phosphate
  modified_base 13: mod_base = OTHER; note = 2'-deoxy-2'-fluorocytidine-3'-phosphate
  modified_base 14: mod_base = OTHER; note = 2'-O-methyluridine-3'-phosphate
  modified_base 15: mod_base = OTHER; note = 2'-deoxy-2'-fluoroadenosine-3'-phosphate
  modified_base 16: mod_base = OTHER; note = 2'-O-methylguanosine-3'-phosphate
  modified_base 17: mod_base = OTHER; note = 2'-deoxy-2'-fluorouridine-3'-phosphate
  modified_base 18: mod_base = OTHER; note = 2'-O-methyluridine-3'-phosphate
  modified_base 19: mod_base = OTHER; note = 2'-deoxy-2'-fluoroadenosine-3'-phosphate
  modified_base 20: mod_base = OTHER; note = 2'-O-methyluridine-3'-phosphate
  modified_base 21: mod_base = OTHER; note = 2'-deoxy-2'-fluorouridine
tttattgttcctctagttatt

SEQ ID NO: 885 - RNA, 21 nt, synthetic construct
  source 1..21: mol_type = other RNA
  modified_base 1: mod_base = OTHER; note = 2'-deoxy-2'-fluorouridine-3'-phosphate
  modified_base 2: mod_base = OTHER; note = 2'-O-methylguanosine-3'-phosphate
  modified_base 3: mod_base = OTHER; note = 2'-deoxy-2'-fluorocytidine-3'-phosphate
  modified_base 4: mod_base = OTHER; note = 2'-O-methyluridine-3'-phosphate
  modified_base 5: mod_base = OTHER; note = 2'-deoxy-2'-fluoroadenosine-3'-phosphate
  modified_base 6: mod_base = OTHER; note = 2'-O-methyluridine-3'-phosphate
  modified_base 7: mod_base = OTHER; note = 2'-deoxy-2'-fluoroguanosine-3'-phosphate
  modified_base 8: mod_base = OTHER; note = 2'-O-methyluridine-3'-phosphate
  modified_base 9: mod_base = OTHER; note = 2'-deoxy-2'-fluorouridine-3'-phosphate
  modified_base 10: mod_base = OTHER; note = 2'-deoxy-2'-fluoroadenosine-3'-phosphate
  modified_base 11: mod_base = OTHER; note = 2'-deoxy-2'-fluoroguanosine-3'-phosphate
  modified_base 12: mod_base = OTHER; note = 2'-O-methyladenosine-3'-phosphate
  modified_base 13: mod_base = OTHER; note = 2'-deoxy-2'-fluorocytidine-3'-phosphate
  modified_base 14: mod_base = OTHER; note = 2'-O-methylguanosine-3'-phosphate
  modified_base 15: mod_base = OTHER; note = 2'-deoxy-2'-fluoroadenosine-3'-phosphate
  modified_base 16: mod_base = OTHER; note = 2'-O-methyluridine-3'-phosphate
  modified_base 17: mod_base = OTHER; note = 2'-deoxy-2'-fluoroguanosine-3'-phosphate
  modified_base 18: mod_base = OTHER; note = 2'-O-methyluridine-3'-phosphate
  modified_base 19: mod_base = OTHER; note = 2'-deoxy-2'-fluoroadenosine-3'-phosphate
  modified_base 20: mod_base = OTHER; note = 2'-O-methyladenosine-3'-phosphate
  modified_base 21: mod_base = OTHER; note = 2'-deoxy-2'-fluoroadenosine
tgctatgttagacgatgtaaa

SEQ ID NO: 886 - RNA, 21 nt, synthetic construct
  source 1..21: mol_type = other RNA
  modified_base 1: mod_base = OTHER; note = 2'-deoxy-2'-fluoroguanosine-3'-phosphate
  modified_base 2: mod_base = OTHER; note = 2'-O-methylguanosine-3'-phosphate
  modified_base 3: mod_base = OTHER; note = 2'-deoxy-2'-fluoroguanosine-3'-phosphate
  modified_base 4: mod_base = OTHER; note = 2'-O-methyladenosine-3'-phosphate
  modified_base 5: mod_base = OTHER; note = 2'-deoxy-2'-fluorocytidine-3'-phosphate
  modified_base 6: mod_base = OTHER; note = 2'-O-methyladenosine-3'-phosphate
  modified_base 7: mod_base = OTHER; note = 2'-deoxy-2'-fluorouridine-3'-phosphate
  modified_base 8: mod_base = OTHER; note = 2'-O-methylguanosine-3'-phosphate
  modified_base 9: mod_base = OTHER; note = 2'-deoxy-2'-fluoroguanosine-3'-phosphate
  modified_base 10: mod_base = OTHER; note = 2'-deoxy-2'-fluorouridine-3'-phosphate
  modified_base 11: mod_base = OTHER; note = 2'-deoxy-2'-fluorocytidine-3'-phosphate
  modified_base 12: mod_base = OTHER; note = 2'-O-methyluridine-3'-phosphate
  modified_base 13: mod_base = OTHER; note = 2'-deoxy-2'-fluorouridine-3'-phosphate
  modified_base 14: mod_base = OTHER; note = 2'-O-methyladenosine-3'-phosphate
  modified_base 15: mod_base = OTHER; note = 2'-deoxy-2'-fluoroadenosine-3'-phosphate
  modified_base 16: mod_base = OTHER; note = 2'-O-methyladenosine-3'-phosphate
  modified_base 17: mod_base = OTHER; note = 2'-deoxy-2'-fluoroguanosine-3'-phosphate
  modified_base 18: mod_base = OTHER; note = 2'-O-methyladenosine-3'-phosphate
  modified_base 19: mod_base = OTHER; note = 2'-deoxy-2'-fluorocytidine-3'-phosphate
  modified_base 20: mod_base = OTHER; note = 2'-O-methyluridine-3'-phosphate
  modified_base 21: mod_base = OTHER; note = 2'-deoxy-2'-fluorouridine
gggacatggtcttaaagactt

SEQ ID NO: 887 - RNA, 21 nt, synthetic construct
  source 1..21: mol_type = other RNA
  modified_base 1: mod_base = OTHER; note = 2'-deoxy-2'-fluorouridine-3'-phosphate
  modified_base 2: mod_base = OTHER; note = 2'-O-methylguanosine-3'-phosphate
  modified_base 3: mod_base = OTHER; note = 2'-deoxy-2'-fluoroadenosine-3'-phosphate
  modified_base 4: mod_base = OTHER; note = 2'-O-methylcytidine-3'-phosphate
  modified_base 5: mod_base = OTHER; note = 2'-deoxy-2'-fluoroadenosine-3'-phosphate
  modified_base 6: mod_base = OTHER; note = 2'-O-methyluridine-3'-phosphate
  modified_base 7: mod_base = OTHER; note = 2'-deoxy-2'-fluoroadenosine-3'-phosphate
  modified_base 8: mod_base = OTHER; note = 2'-O-methyluridine-3'-phosphate
  modified_base 9: mod_base = OTHER; note = 2'-deoxy-2'-fluorouridine-3'-phosphate
  modified_base 10: mod_base = OTHER; note = 2'-deoxy-2'-fluorouridine-3'-phosphate
  modified_base 11: mod_base = OTHER; note = 2'-deoxy-2'-fluorocytidine-3'-phosphate
  modified_base 12: mod_base = OTHER; note = 2'-O-methyladenosine-3'-phosphate
  modified_base 13: mod_base = OTHER; note = 2'-deoxy-2'-fluoroadenosine-3'-phosphate
  modified_base 14: mod_base = OTHER; note = 2'-O-methyladenosine-3'-phosphate
  modified_base 15: mod_base = OTHER; note = 2'-deoxy-2'-fluoroadenosine-3'-phosphate
  modified_base 16: mod_base = OTHER; note = 2'-O-methyladenosine-3'-phosphate
  modified_base 17: mod_base = OTHER; note = 2'-deoxy-2'-fluorocytidine-3'-phosphate
  modified_base 18: mod_base = OTHER; note = 2'-O-methyluridine-3'-phosphate
  modified_base 19: mod_base = OTHER; note = 2'-deoxy-2'-fluorocytidine-3'-phosphate
  modified_base 20: mod_base = OTHER; note = 2'-O-methyladenosine-3'-phosphate
  modified_base 21: mod_base = OTHER; note = 2'-deoxy-2'-fluoroadenosine
tgacatatttcaaaaactcaa

SEQ ID NO: 888 - RNA, 21 nt, synthetic construct
  source 1..21: mol_type = other RNA
  modified_base 1: mod_base = OTHER; note = 2'-deoxy-2'-fluoroadenosine-3'-phosphate
  modified_base 2: mod_base = OTHER; note = 2'-O-methyluridine-3'-phosphate
  modified_base 3: mod_base = OTHER; note = 2'-deoxy-2'-fluorocytidine-3'-phosphate
  modified_base 4: mod_base = OTHER; note = 2'-O-methyladenosine-3'-phosphate
  modified_base 5: mod_base = OTHER; note = 2'-deoxy-2'-fluoroguanosine-3'-phosphate
  modified_base 6: mod_base = OTHER; note = 2'-O-methyluridine-3'-phosphate
  modified_base 7: mod_base = OTHER; note = 2'-deoxy-2'-fluorocytidine-3'-phosphate
  modified_base 8: mod_base = OTHER; note = 2'-O-methyluridine-3'-phosphate
  modified_base 9: mod_base = OTHER; note = 2'-deoxy-2'-fluorouridine-3'-phosphate
  modified_base 10: mod_base = OTHER; note = 2'-deoxy-2'-fluorouridine-3'-phosphate
  modified_base 11: mod_base = OTHER; note = 2'-deoxy-2'-fluorouridine-3'-phosphate
  modified_base 12: mod_base = OTHER; note = 2'-O-methyluridine-3'-phosphate
  modified_base 13: mod_base = OTHER; note = 2'-deoxy-2'-fluoroadenosine-3'-phosphate
  modified_base 14: mod_base = OTHER; note = 2'-O-methyluridine-3'-phosphate
  modified_base 15: mod_base = OTHER; note = 2'-deoxy-2'-fluoroguanosine-3'-phosphate
  modified_base 16: mod_base = OTHER; note = 2'-O-methyladenosine-3'-phosphate
  modified_base 17: mod_base = OTHER; note = 2'-deoxy-2'-fluorouridine-3'-phosphate
  modified_base 18: mod_base = OTHER; note = 2'-O-methylcytidine-3'-phosphate
  modified_base 19: mod_base = OTHER; note = 2'-deoxy-2'-fluorouridine-3'-phosphate
  modified_base 20: mod_base = OTHER; note = 2'-O-methyladenosine-3'-phosphate
  modified_base 21: mod_base = OTHER; note = 2'-deoxy-2'-fluorouridine
atcagtctttttatgatctat

SEQ ID NO: 889 - RNA, 21 nt, synthetic construct
  source 1..21: mol_type = other RNA
  modified_base 1: mod_base = OTHER; note = 2'-deoxy-2'-fluorocytidine-3'-phosphate
  modified_base 2: mod_base = OTHER; note = 2'-O-methyladenosine-3'-phosphate
  modified_base 3: mod_base = OTHER; note = 2'-deoxy-2'-fluorouridine-3'-phosphate
  modified_base 4: mod_base = OTHER; note = 2'-O-methyladenosine-3'-phosphate
  modified_base 5: mod_base = OTHER; note = 2'-deoxy-2'-fluorouridine-3'-phosphate
  modified_base 6: mod_base = OTHER; note = 2'-O-methyladenosine-3'-phosphate
  modified_base 7: mod_base = OTHER; note = 2'-deoxy-2'-fluoroadenosine-3'-phosphate
  modified_base 8: mod_base = OTHER; note = 2'-O-methyladenosine-3'-phosphate
  modified_base 9: mod_base = OTHER; note = 2'-deoxy-2'-fluorocytidine-3'-phosphate
  modified_base 10: mod_base = OTHER; note = 2'-deoxy-2'-fluorouridine-3'-phosphate
  modified_base 11: mod_base = OTHER; note = 2'-deoxy-2'-fluoroadenosine-3'-phosphate
  modified_base 12: mod_base = OTHER; note = 2'-O-methylcytidine-3'-phosphate
  modified_base 13: mod_base = OTHER; note = 2'-deoxy-2'-fluoroadenosine-3'-phosphate
  modified_base 14: mod_base = OTHER; note = 2'-O-methyladenosine-3'-phosphate
  modified_base 15: mod_base = OTHER; note = 2'-deoxy-2'-fluoroguanosine-3'-phosphate
  modified_base 16: mod_base = OTHER; note = 2'-O-methyluridine-3'-phosphate
  modified_base 17: mod_base = OTHER; note = 2'-deoxy-2'-fluorocytidine-3'-phosphate
  modified_base 18: mod_base = OTHER; note = 2'-O-methyladenosine-3'-phosphate
  modified_base 19: mod_base = OTHER; note = 2'-deoxy-2'-fluoroadenosine-3'-phosphate
  modified_base 20: mod_base = OTHER; note = 2'-O-methyladenosine-3'-phosphate
  modified_base 21: mod_base = OTHER; note = 2'-deoxy-2'-fluoroadenosine
catataaactacaagtcaaaa

SEQ ID NO: 890 - RNA, 21 nt, synthetic construct
  source 1..21: mol_type = other RNA
  modified_base 1: mod_base = OTHER; note = 2'-deoxy-2'-fluorocytidine-3'-phosphate
  modified_base 2: mod_base = OTHER; note = 2'-O-methyluridine-3'-phosphate
  modified_base 3: mod_base = OTHER; note = 2'-deoxy-2'-fluorouridine-3'-phosphate
  modified_base 4: mod_base = OTHER; note = 2'-O-methylguanosine-3'-phosphate
  modified_base 5: mod_base = OTHER; note = 2'-deoxy-2'-fluoroadenosine-3'-phosphate
  modified_base 6: mod_base = OTHER; note = 2'-O-methyladenosine-3'-phosphate
  modified_base 7: mod_base = OTHER; note = 2'-deoxy-2'-fluorocytidine-3'-phosphate
  modified_base 8: mod_base = OTHER; note = 2'-O-methyluridine-3'-phosphate
  modified_base 9: mod_base = OTHER; note = 2'-deoxy-2'-fluorocytidine-3'-phosphate
  modified_base 10: mod_base = OTHER; note = 2'-deoxy-2'-fluoroadenosine-3'-phosphate
  modified_base 11: mod_base = OTHER; note = 2'-deoxy-2'-fluoroadenosine-3'-phosphate
  modified_base 12: mod_base = OTHER; note = 2'-O-methylcytidine-3'-phosphate
  modified_base 13: mod_base = OTHER; note = 2'-deoxy-2'-fluorouridine-3'-phosphate
  modified_base 14: mod_base = OTHER; note = 2'-O-methylcytidine-3'-phosphate
  modified_base 15: mod_base = OTHER; note = 2'-deoxy-2'-fluoroadenosine-3'-phosphate
  modified_base 16: mod_base = OTHER; note = 2'-O-methyladenosine-3'-phosphate
  modified_base 17: mod_base = OTHER; note = 2'-deoxy-2'-fluoroadenosine-3'-phosphate
  modified_base 18: mod_base = OTHER; note = 2'-O-methyladenosine-3'-phosphate
  modified_base 19: mod_base = OTHER; note = 2'-deoxy-2'-fluorocytidine-3'-phosphate
  modified_base 20: mod_base = OTHER; note = 2'-O-methyluridine-3'-phosphate
  modified_base 21: mod_base = OTHER; note = 2'-deoxy-2'-fluorouridine
cttgaactcaactcaaaactt

SEQ ID NO: 891 - RNA, 21 nt, synthetic construct
  source 1..21: mol_type = other RNA
  modified_base 1: mod_base = OTHER; note = 2'-deoxy-2'-fluorocytidine-3'-phosphate
  modified_base 2: mod_base = OTHER; note = 2'-O-methyluridine-3'-phosphate
  modified_base 3: mod_base = OTHER; note = 2'-deoxy-2'-fluoroadenosine-3'-phosphate
  modified_base 4: mod_base = OTHER; note = 2'-O-methylcytidine-3'-phosphate
  modified_base 5: mod_base = OTHER; note = 2'-deoxy-2'-fluorouridine-3'-phosphate
  modified_base 6: mod_base = OTHER; note = 2'-O-methyluridine-3'-phosphate
  modified_base 7: mod_base = OTHER; note = 2'-deoxy-2'-fluorocytidine-3'-phosphate
  modified_base 8: mod_base = OTHER; note = 2'-O-methyladenosine-3'-phosphate
  modified_base 9: mod_base = OTHER; note = 2'-deoxy-2'-fluoroadenosine-3'-phosphate
  modified_base 10: mod_base = OTHER; note = 2'-deoxy-2'-fluorocytidine-3'-phosphate
  modified_base 11: mod_base = OTHER; note = 2'-deoxy-2'-fluoroadenosine-3'-phosphate
  modified_base 12: mod_base = OTHER; note = 2'-O-methyladenosine-3'-phosphate
  modified_base 13: mod_base = OTHER; note = 2'-deoxy-2'-fluoroadenosine-3'-phosphate
  modified_base 14: mod_base = OTHER; note = 2'-O-methyladenosine-3'-phosphate
  modified_base 15: mod_base = OTHER; note = 2'-deoxy-2'-fluoroadenosine-3'-phosphate
  modified_base 16: mod_base = OTHER; note = 2'-O-methylguanosine-3'-phosphate
  modified_base 17: mod_base = OTHER; note = 2'-deoxy-2'-fluorouridine-3'-phosphate
  modified_base 18: mod_base = OTHER; note = 2'-O-methylguanosine-3'-phosphate
  modified_base 19: mod_base = OTHER; note = 2'-deoxy-2'-fluoroadenosine-3'-phosphate
  modified_base 20: mod_base = OTHER; note = 2'-O-methyladenosine-3'-phosphate
  modified_base 21: mod_base = OTHER; note = 2'-deoxy-2'-fluoroadenosine
ctacttcaacaaaaagtgaaa

SEQ ID NO: 892 - RNA, 21 nt, synthetic construct
  source 1..21: mol_type = other RNA
  modified_base 1: mod_base = OTHER; note = 2'-deoxy-2'-fluoroadenosine-3'-phosphate
  modified_base 2: mod_base = OTHER; note = 2'-O-methyladenosine-3'-phosphate
  modified_base 3: mod_base = OTHER; note = 2'-deoxy-2'-fluoroguanosine-3'-phosphate
  modified_base 4: mod_base = OTHER; note = 2'-O-methyladenosine-3'-phosphate
  modified_base 5: mod_base = OTHER; note = 2'-deoxy-2'-fluoroguanosine-3'-phosphate
  modified_base 6: mod_base = OTHER; note = 2'-O-methylcytidine-3'-phosphate
  modified_base 7: mod_base = OTHER; note = 2'-deoxy-2'-fluoroadenosine-3'-phosphate
  modified_base 8: mod_base = OTHER; note = 2'-O-methyladenosine-3'-phosphate
  modified_base 9: mod_base = OTHER; note = 2'-deoxy-2'-fluorocytidine-3'-phosphate
  modified_base 10: mod_base = OTHER; note = 2'-deoxy-2'-fluorouridine-3'-phosphate
  modified_base 11: mod_base = OTHER; note = 2'-deoxy-2'-fluoroadenosine-3'-phosphate
  modified_base 12: mod_base = OTHER; note = 2'-O-methyladenosine-3'-phosphate
  modified_base 13: mod_base = OTHER; note = 2'-deoxy-2'-fluorocytidine-3'-phosphate
  modified_base 14: mod_base = OTHER; note = 2'-O-methyluridine-3'-phosphate
  modified_base 15: mod_base = OTHER; note = 2'-deoxy-2'-fluoroadenosine-3'-phosphate
  modified_base 16: mod_base = OTHER; note = 2'-O-methyladenosine-3'-phosphate
  modified_base 17: mod_base = OTHER; note = 2'-deoxy-2'-fluorocytidine-3'-phosphate
  modified_base 18: mod_base = OTHER; note = 2'-O-methyluridine-3'-phosphate
  modified_base 19: mod_base = OTHER; note = 2'-deoxy-2'-fluorouridine-3'-phosphate
  modified_base 20: mod_base = OTHER; note = 2'-O-methyladenosine-3'-phosphate
  modified_base 21: mod_base = OTHER; note = 2'-deoxy-2'-fluoroadenosine
aagagcaactaactaacttaa

SEQ ID NO: 893 - RNA, 21 nt, synthetic construct
  source 1..21: mol_type = other RNA
  modified_base 1: mod_base = OTHER; note = 2'-deoxy-2'-fluoroadenosine-3'-phosphate
  modified_base 2: mod_base = OTHER; note = 2'-O-methyladenosine-3'-phosphate
  modified_base 3: mod_base = OTHER; note = 2'-deoxy-2'-fluoroadenosine-3'-phosphate
  modified_base 4: mod_base = OTHER; note = 2'-O-methylcytidine-3'-phosphate
  modified_base 5: mod_base = OTHER; note = 2'-deoxy-2'-fluoroadenosine-3'-phosphate
  modified_base 6: mod_base = OTHER; note = 2'-O-methyladenosine-3'-phosphate
  modified_base 7: mod_base = OTHER; note = 2'-deoxy-2'-fluoroguanosine-3'-phosphate
  modified_base 8: mod_base = OTHER; note = 2'-O-methyladenosine-3'-phosphate
  modified_base 9: mod_base = OTHER; note = 2'-deoxy-2'-fluorouridine-3'-phosphate
  modified_base 10: mod_base = OTHER; note = 2'-deoxy-2'-fluoroadenosine-3'-phosphate
  modified_base 11: mod_base = OTHER; note = 2'-deoxy-2'-fluoroadenosine-3'-phosphate
  modified_base 12: mod_base = OTHER; note = 2'-O-methyluridine-3'-phosphate
  modified_base 13: mod_base = OTHER; note = 2'-deoxy-2'-fluoroadenosine-3'-phosphate
  modified_base 14: mod_base = OTHER; note = 2'-O-methylguanosine-3'-phosphate
  modified_base 15: mod_base = OTHER; note = 2'-deoxy-2'-fluorocytidine-3'-phosphate
  modified_base 16: mod_base = OTHER; note = 2'-O-methyladenosine-3'-phosphate
  modified_base 17: mod_base = OTHER; note = 2'-deoxy-2'-fluorouridine-3'-phosphate
  modified_base 18: mod_base = OTHER; note = 2'-O-methylcytidine-3'-phosphate
  modified_base 19: mod_base = OTHER; note = 2'-deoxy-2'-fluoroadenosine-3'-phosphate
  modified_base 20: mod_base = OTHER; note = 2'-O-methyladenosine-3'-phosphate
  modified_base 21: mod_base = OTHER; note = 2'-deoxy-2'-fluoroadenosine
aaacaagataatagcatcaaa

SEQ ID NO: 894 - RNA, 21 nt, synthetic construct
  source 1..21: mol_type = other RNA
  modified_base 1: mod_base = OTHER; note = 2'-deoxy-2'-fluoroguanosine-3'-phosphate
  modified_base 2: mod_base = OTHER; note = 2'-O-methylcytidine-3'-phosphate
  modified_base 3: mod_base = OTHER; note = 2'-deoxy-2'-fluoroadenosine-3'-phosphate
  modified_base 4: mod_base = OTHER; note = 2'-O-methyluridine-3'-phosphate
  modified_base 5: mod_base = OTHER; note = 2'-deoxy-2'-fluoroadenosine-3'-phosphate
  modified_base 6: mod_base = OTHER; note = 2'-O-methylguanosine-3'-phosphate
  modified_base 7: mod_base = OTHER; note = 2'-deoxy-2'-fluorouridine-3'-phosphate
  modified_base 8: mod_base = OTHER; note = 2'-O-methylcytidine-3'-phosphate
  modified_base 9: mod_base = OTHER; note = 2'-deoxy-2'-fluoroadenosine-3'-phosphate
  modified_base 10: mod_base = OTHER; note = 2'-deoxy-2'-fluoroadenosine-3'-phosphate
  modified_base 11: mod_base = OTHER; note = 2'-deoxy-2'-fluoroadenosine-3'-phosphate
  modified_base 12: mod_base = OTHER; note = 2'-O-methyluridine-3'-phosphate
  modified_base 13: mod_base = OTHER; note = 2'-deoxy-2'-fluoroadenosine-3'-phosphate
  modified_base 14: mod_base = OTHER; note = 2'-O-methyladenosine-3'-phosphate
  modified_base 15: mod_base = OTHER; note = 2'-deoxy-2'-fluoroadenosine-3'-phosphate
  modified_base 16: mod_base = OTHER; note = 2'-O-methyladenosine-3'-phosphate
  modified_base 17: mod_base = OTHER; note = 2'-deoxy-2'-fluoroguanosine-3'-phosphate
  modified_base 18: mod_base = OTHER; note = 2'-O-methyladenosine-3'-phosphate
  modified_base 19: mod_base = OTHER; note = 2'-deoxy-2'-fluoroadenosine-3'-phosphate
  modified_base 20: mod_base = OTHER; note = 2'-O-methyladenosine-3'-phosphate
  modified_base 21: mod_base = OTHER; note = 2'-deoxy-2'-fluorouridine
gcatagtcaaataaaagaaat

SEQ ID NO: 895 - RNA, 21 nt, synthetic construct
  source 1..21: mol_type = other RNA
  modified_base 1: mod_base = OTHER; note = 2'-deoxy-2'-fluoroadenosine-3'-phosphate
  modified_base 2: mod_base = OTHER; note = 2'-O-methyluridine-3'-phosphate
  modified_base 3: mod_base = OTHER; note = 2'-deoxy-2'-fluoroadenosine-3'-phosphate
  modified_base 4: mod_base = OTHER; note = 2'-O-methyluridine-3'-phosphate
  modified_base 5: mod_base = OTHER; note = 2'-deoxy-2'-fluoroadenosine-3'-phosphate
  modified_base 6: mod_base = OTHER; note = 2'-O-methyladenosine-3'-phosphate
  modified_base 7: mod_base = OTHER; note = 2'-deoxy-2'-fluoroadenosine-3'-phosphate
  modified_base 8: mod_base = OTHER; note = 2'-O-methylcytidine-3'-phosphate
  modified_base 9: mod_base = OTHER; note = 2'-deoxy-2'-fluorouridine-3'-phosphate
  modified_base 10: mod_base = OTHER; note = 2'-deoxy-2'-fluoroadenosine-3'-phosphate
  modified_base 11: mod_base = OTHER; note = 2'-deoxy-2'-fluorocytidine-3'-phosphate
  modified_base 12: mod_base = OTHER; note = 2'-O-methyladenosine-3'-phosphate
  modified_base 13: mod_base = OTHER; note = 2'-deoxy-2'-fluoroadenosine-3'-phosphate
  modified_base 14: mod_base = OTHER; note = 2'-O-methylguanosine-3'-phosphate
  modified_base 15: mod_base = OTHER; note = 2'-deoxy-2'-fluorouridine-3'-phosphate
  modified_base 16: mod_base = OTHER; note = 2'-O-methylcytidine-3'-phosphate
  modified_base 17: mod_base = OTHER; note = 2'-deoxy-2'-fluoroadenosine-3'-phosphate
  modified_base 18: mod_base = OTHER; note = 2'-O-methyladenosine-3'-phosphate
  modified_base 19: mod_base = OTHER; note = 2'-deoxy-2'-fluoroadenosine-3'-phosphate
  modified_base 20: mod_base = OTHER; note = 2'-O-methyladenosine-3'-phosphate
  modified_base 21: mod_base = OTHER; note = 2'-deoxy-2'-fluoroadenosine
atataaactacaagtcaaaaa

SEQ ID NO: 896 - RNA, 21 nt, synthetic construct
  source 1..21: mol_type = other RNA
  modified_base 1: mod_base = OTHER; note = 2'-deoxy-2'-fluoroguanosine-3'-phosphate
  modified_base 2: mod_base = OTHER; note = 2'-O-methyladenosine-3'-phosphate
  modified_base 3: mod_base = OTHER; note = 2'-deoxy-2'-fluoroadenosine-3'-phosphate
  modified_base 4: mod_base = OTHER; note = 2'-O-methylcytidine-3'-phosphate
  modified_base 5: mod_base = OTHER; note = 2'-deoxy-2'-fluorouridine-3'-phosphate
  modified_base 6: mod_base = OTHER; note = 2'-O-methylcytidine-3'-phosphate
  modified_base 7: mod_base = OTHER; note = 2'-deoxy-2'-fluoroadenosine-3'-phosphate
  modified_base 8: mod_base = OTHER; note = 2'-O-methyladenosine-3'-phosphate
  modified_base 9: mod_base = OTHER; note = 2'-deoxy-2'-fluorocytidine-3'-phosphate
  modified_base 10: mod_base = OTHER; note = 2'-deoxy-2'-fluorouridine-3'-phosphate
  modified_base 11: mod_base = OTHER; note = 2'-deoxy-2'-fluorocytidine-3'-phosphate
  modified_base 12: mod_base = OTHER; note = 2'-O-methyladenosine-3'-phosphate
  modified_base 13: mod_base = OTHER; note = 2'-deoxy-2'-fluoroadenosine-3'-phosphate
  modified_base 14: mod_base = OTHER; note = 2'-O-methyladenosine-3'-phosphate
  modified_base 15: mod_base = OTHER; note = 2'-deoxy-2'-fluoroadenosine-3'-phosphate
  modified_base 16: mod_base = OTHER; note = 2'-O-methylcytidine-3'-phosphate
  modified_base 17: mod_base = OTHER; note = 2'-deoxy-2'-fluorouridine-3'-phosphate
  modified_base 18: mod_base = OTHER; note = 2'-O-methyluridine-3'-phosphate
  modified_base 19: mod_base = OTHER; note = 2'-deoxy-2'-fluoroguanosine-3'-phosphate
  modified_base 20: mod_base = OTHER; note = 2'-O-methyladenosine-3'-phosphate
  modified_base 21: mod_base = OTHER; note = 2'-deoxy-2'-fluoroadenosine
gaactcaactcaaaacttgaa

SEQ ID NO: 897 - RNA, 21 nt, synthetic construct
  source 1..21: mol_type = other RNA
  modified_base 1: mod_base = OTHER; note = 2'-deoxy-2'-fluorouridine-3'-phosphate
  modified_base 2: mod_base = OTHER; note = 2'-O-methyladenosine-3'-phosphate
  modified_base 3: mod_base = OTHER; note = 2'-deoxy-2'-fluorocytidine-3'-phosphate
  modified_base 4: mod_base = OTHER; note = 2'-O-methyluridine-3'-phosphate
  modified_base 5: mod_base = OTHER; note = 2'-deoxy-2'-fluorouridine-3'-phosphate
  modified_base 6: mod_base = OTHER; note = 2'-O-methylcytidine-3'-phosphate
  modified_base 7: mod_base = OTHER; note = 2'-deoxy-2'-fluoroadenosine-3'-phosphate
  modified_base 8: mod_base = OTHER; note = 2'-O-methyladenosine-3'-phosphate
  modified_base 9: mod_base = OTHER; note = 2'-deoxy-2'-fluorocytidine-3'-phosphate
  modified_base 10: mod_base = OTHER; note = 2'-deoxy-2'-fluoroadenosine-3'-phosphate
  modified_base 11: mod_base = OTHER; note = 2'-deoxy-2'-fluoroadenosine-3'-phosphate
  modified_base 12: mod_base = OTHER; note = 2'-O-methyladenosine-3'-phosphate
  modified_base 13: mod_base = OTHER; note = 2'-deoxy-2'-fluoroadenosine-3'-phosphate
  modified_base 14: mod_base = OTHER; note = 2'-O-methyladenosine-3'-phosphate
  modified_base 15: mod_base = OTHER; note = 2'-deoxy-2'-fluoroguanosine-3'-phosphate
  modified_base 16: mod_base = OTHER; note = 2'-O-methyluridine-3'-phosphate
  modified_base 17: mod_base = OTHER; note = 2'-deoxy-2'-fluoroguanosine-3'-phosphate
  modified_base 18: mod_base = OTHER; note = 2'-O-methyladenosine-3'-phosphate
  modified_base 19: mod_base = OTHER; note = 2'-deoxy-2'-fluoroadenosine-3'-phosphate
  modified_base 20: mod_base = OTHER; note = 2'-O-methyladenosine-3'-phosphate
  modified_base 21: mod_base = OTHER; note = 2'-deoxy-2'-fluorouridine
tacttcaacaaaaagtgaaat

SEQ ID NO: 898 - RNA, 21 nt, synthetic construct
  source 1..21: mol_type = other RNA
  modified_base 1: mod_base = OTHER; note = 2'-deoxy-2'-fluoroadenosine-3'-phosphate
  modified_base 2: mod_base = OTHER; note = 2'-O-methylguanosine-3'-phosphate
  modified_base 3: mod_base = OTHER; note = 2'-deoxy-2'-fluoroadenosine-3'-phosphate
  modified_base 4: mod_base = OTHER; note = 2'-O-methylguanosine-3'-phosphate
  modified_base 5: mod_base = OTHER; note = 2'-deoxy-2'-fluorocytidine-3'-phosphate
  modified_base 6: mod_base = OTHER; note = 2'-O-methyladenosine-3'-phosphate
  modified_base 7: mod_base = OTHER; note = 2'-deoxy-2'-fluoroadenosine-3'-phosphate
  modified_base 8: mod_base = OTHER; note = 2'-O-methylcytidine-3'-phosphate
  modified_base 9: mod_base = OTHER; note = 2'-deoxy-2'-fluorouridine-3'-phosphate
  modified_base 10: mod_base = OTHER; note = 2'-deoxy-2'-fluoroadenosine-3'-phosphate
  modified_base 11: mod_base = OTHER; note = 2'-deoxy-2'-fluoroadenosine-3'-phosphate
  modified_base 12: mod_base = OTHER; note = 2'-O-methylcytidine-3'-phosphate
  modified_base 13: mod_base = OTHER; note = 2'-deoxy-2'-fluorouridine-3'-phosphate
  modified_base 14: mod_base = OTHER; note = 2'-O-methyladenosine-3'-phosphate
  modified_base 15: mod_base = OTHER; note = 2'-deoxy-2'-fluoroadenosine-3'-phosphate
  modified_base 16: mod_base = OTHER; note = 2'-O-methylcytidine-3'-phosphate
  modified_base 17: mod_base = OTHER; note = 2'-deoxy-2'-fluorouridine-3'-phosphate
  modified_base 18: mod_base = OTHER; note = 2'-O-methyluridine-3'-phosphate
  modified_base 19: mod_base = OTHER; note = 2'-deoxy-2'-fluoroadenosine-3'-phosphate
  modified_base 20: mod_base = OTHER; note = 2'-O-methyladenosine-3'-phosphate
  modified_base 21: mod_base = OTHER; note = 2'-deoxy-2'-fluorouridine
agagcaactaactaacttaat

SEQ ID NO: 899 - RNA, 21 nt, synthetic construct
  source 1..21: mol_type = other RNA
  modified_base 1: mod_base = OTHER; note = 2'-deoxy-2'-fluoroguanosine-3'-phosphate
  modified_base 2: mod_base = OTHER; note = 2'-O-methyladenosine-3'-phosphate
  modified_base 3: mod_base = OTHER; note = 2'-deoxy-2'-fluorouridine-3'-phosphate
  modified_base 4: mod_base = OTHER; note = 2'-O-methyladenosine-3'-phosphate
  modified_base 5: mod_base = OTHER; note = 2'-deoxy-2'-fluoroadenosine-3'-phosphate
  modified_base 6: mod_base = OTHER; note = 2'-O-methyluridine-3'-phosphate
  modified_base 7: mod_base = OTHER; note = 2'-deoxy-2'-fluoroadenosine-3'-phosphate
  modified_base 8: mod_base = OTHER; note = 2'-O-methylguanosine-3'-phosphate
  modified_base 9: mod_base = OTHER; note = 2'-deoxy-2'-fluorocytidine-3'-phosphate
  modified_base 10: mod_base = OTHER; note = 2'-deoxy-2'-fluoroadenosine-3'-phosphate
  modified_base 11: mod_base = OTHER; note = 2'-deoxy-2'-fluorouridine-3'-phosphate
  modified_base 12: mod_base = OTHER; note = 2'-O-methylcytidine-3'-phosphate
  modified_base 13: mod_base = OTHER; note = 2'-deoxy-2'-fluoroadenosine-3'-phosphate
  modified_base 14: mod_base = OTHER; note = 2'-O-methyladenosine-3'-phosphate
  modified_base 15: mod_base = OTHER; note = 2'-deoxy-2'-fluoroadenosine-3'-phosphate
  modified_base 16: mod_base = OTHER; note = 2'-O-methylguanosine-3'-phosphate
  modified_base 17: mod_base = OTHER; note = 2'-deoxy-2'-fluoroadenosine-3'-phosphate
  modified_base 18: mod_base = OTHER; note = 2'-O-methylcytidine-3'-phosphate
  modified_base 19: mod_base = OTHER; note = 2'-deoxy-2'-fluorocytidine-3'-phosphate
  modified_base 20: mod_base = OTHER; note = 2'-O-methyluridine-3'-phosphate
  modified_base 21: mod_base = OTHER; note = 2'-deoxy-2'-fluorouridine
gataatagcatcaaagacctt

SEQ ID NO: 900 - RNA, 21 nt, synthetic construct
  source 1..21: mol_type = other RNA
  modified_base 1: mod_base = OTHER; note = 2'-deoxy-2'-fluorocytidine-3'-phosphate
  modified_base 2: mod_base = OTHER; note = 2'-O-methyladenosine-3'-phosphate
  modified_base 3: mod_base = OTHER; note = 2'-deoxy-2'-fluorouridine-3'-phosphate
  modified_base 4: mod_base = OTHER; note = 2'-O-methyladenosine-3'-phosphate
  modified_base 5: mod_base = OTHER; note = 2'-deoxy-2'-fluoroguanosine-3'-phosphate
  modified_base 6: mod_base = OTHER; note = 2'-O-methyluridine-3'-phosphate
  modified_base 7: mod_base = OTHER; note = 2'-deoxy-2'-fluorocytidine-3'-phosphate
  modified_base 8: mod_base = OTHER; note = 2'-O-methyladenosine-3'-phosphate
  modified_base 9: mod_base = OTHER; note = 2'-deoxy-2'-fluoroadenosine-3'-phosphate
  modified_base 10: mod_base = OTHER; note = 2'-deoxy-2'-fluoroadenosine-3'-phosphate
  modified_base 11: mod_base = OTHER; note = 2'-deoxy-2'-fluorouridine-3'-phosphate
  modified_base 12: mod_base = OTHER; note = 2'-O-methyladenosine-3'-phosphate
  modified_base 13: mod_base = OTHER; note = 2'-deoxy-2'-fluoroadenosine-3'-phosphate
  modified_base 14: mod_base = OTHER; note = 2'-O-methyladenosine-3'-phosphate
  modified_base 15: mod_base = OTHER; note = 2'-deoxy-2'-fluoroadenosine-3'-phosphate
  modified_base 16: mod_base = OTHER; note = 2'-O-methylguanosine-3'-phosphate
  modified_base 17: mod_base = OTHER; note = 2'-deoxy-2'-fluoroadenosine-3'-phosphate
  modified_base 18: mod_base = OTHER; note = 2'-O-methyladenosine-3'-phosphate
  modified_base 19: mod_base = OTHER; note = 2'-deoxy-2'-fluoroadenosine-3'-phosphate
  modified_base 20: mod_base = OTHER; note = 2'-O-methyluridine-3'-phosphate
  modified_base 21: mod_base = OTHER; note = 2'-deoxy-2'-fluoroadenosine
catagtcaaataaaagaaata

SEQ ID NO: 901 - RNA, 21 nt, synthetic construct
  source 1..21: mol_type = other RNA
  modified_base 1: mod_base = OTHER; note = 2'-deoxy-2'-fluorouridine-3'-phosphate
  modified_base 2: mod_base = OTHER; note = 2'-O-methyladenosine-3'-phosphate
  modified_base 3: mod_base = OTHER; note = 2'-deoxy-2'-fluorouridine-3'-phosphate
  modified_base 4: mod_base = OTHER; note = 2'-O-methyladenosine-3'-phosphate
  modified_base 5: mod_base = OTHER; note = 2'-deoxy-2'-fluoroadenosine-3'-phosphate
  modified_base 6: mod_base = OTHER; note = 2'-O-methyladenosine-3'-phosphate
  modified_base 7: mod_base = OTHER; note = 2'-deoxy-2'-fluorocytidine-3'-phosphate
  modified_base 8: mod_base = OTHER; note = 2'-O-methyluridine-3'-phosphate
  modified_base 9: mod_base = OTHER; note = 2'-deoxy-2'-fluoroadenosine-3'-phosphate
  modified_base 10: mod_base = OTHER; note = 2'-deoxy-2'-fluorocytidine-3'-phosphate
  modified_base 11: mod_base = OTHER; note = 2'-deoxy-2'-fluoroadenosine-3'-phosphate
  modified_base 12: mod_base = OTHER; note = 2'-O-methyladenosine-3'-phosphate
  modified_base 13: mod_base = OTHER; note = 2'-deoxy-2'-fluoroguanosine-3'-phosphate
  modified_base 14: mod_base = OTHER; note = 2'-O-methyluridine-3'-phosphate
  modified_base 15: mod_base = OTHER; note = 2'-deoxy-2'-fluorocytidine-3'-phosphate
  modified_base 16: mod_base = OTHER; note = 2'-O-methyladenosine-3'-phosphate
  modified_base 17: mod_base = OTHER; note = 2'-deoxy-2'-fluoroadenosine-3'-phosphate
  modified_base 18: mod_base = OTHER; note = 2'-O-methyladenosine-3'-phosphate
  modified_base 19: mod_base = OTHER; note = 2'-deoxy-2'-fluoroadenosine-3'-phosphate
  modified_base 20: mod_base = OTHER; note = 2'-O-methyladenosine-3'-phosphate
  modified_base 21: mod_base = OTHER; note = 2'-deoxy-2'-fluorouridine
tataaactacaagtcaaaaat

SEQ ID NO: 902 - RNA, 21 nt, synthetic construct
  source 1..21: mol_type = other RNA
  modified_base 1: mod_base = OTHER; note = 2'-deoxy-2'-fluoroadenosine-3'-phosphate
  modified_base 2: mod_base = OTHER; note = 2'-O-methyladenosine-3'-phosphate
  modified_base 3: mod_base = OTHER; note = 2'-deoxy-2'-fluorocytidine-3'-phosphate
  modified_base 4: mod_base = OTHER; note = 2'-O-methyluridine-3'-phosphate
  modified_base 5: mod_base = OTHER; note = 2'-deoxy-2'-fluorocytidine-3'-phosphate
  modified_base 6: mod_base = OTHER; note = 2'-O-methyladenosine-3'-phosphate
  modified_base 7: mod_base = OTHER; note = 2'-deoxy-2'-fluoroadenosine-3'-phosphate
  modified_base 8: mod_base = OTHER; note = 2'-O-methylcytidine-3'-phosphate
  modified_base 9: mod_base = OTHER; note = 2'-deoxy-2'-fluorouridine-3'-phosphate
  modified_base 10: mod_base = OTHER; note = 2'-deoxy-2'-fluorocytidine-3'-phosphate
  modified_base 11: mod_base = OTHER; note = 2'-deoxy-2'-fluoroadenosine-3'-phosphate
  modified_base 12: mod_base = OTHER; note = 2'-O-methyladenosine-3'-phosphate
  modified_base 13: mod_base = OTHER; note = 2'-deoxy-2'-fluoroadenosine-3'-phosphate
  modified_base 14: mod_base = OTHER; note = 2'-O-methyladenosine-3'-phosphate
  modified_base 15: mod_base = OTHER; note = 2'-deoxy-2'-fluorocytidine-3'-phosphate
  modified_base 16: mod_base = OTHER; note = 2'-O-methyluridine-3'-phosphate
  modified_base 17: mod_base = OTHER; note = 2'-deoxy-2'-fluorouridine-3'-phosphate
  modified_base 18: mod_base = OTHER; note = 2'-O-methylguanosine-3'-phosphate
  modified_base 19: mod_base = OTHER; note = 2'-deoxy-2'-fluoroadenosine-3'-phosphate
  modified_base 20: mod_base = OTHER; note = 2'-O-methyladenosine-3'-phosphate
  modified_base 21: mod_base = OTHER; note = 2'-deoxy-2'-fluoroadenosine
aactcaactcaaaacttgaaa

SEQ ID NO: 903 - RNA, 21 nt, synthetic construct
  source 1..21: mol_type = other RNA
  modified_base 1: mod_base = OTHER; note = 2'-deoxy-2'-fluoroadenosine-3'-phosphate
  modified_base 2: mod_base = OTHER; note = 2'-O-methylcytidine-3'-phosphate
  modified_base 3: mod_base = OTHER; note = 2'-deoxy-2'-fluorouridine-3'-phosphate
  modified_base 4: mod_base = OTHER; note = 2'-O-methyluridine-3'-phosphate
  modified_base 5: mod_base = OTHER; note = 2'-deoxy-2'-fluorocytidine-3'-phosphate
  modified_base 6: mod_base = OTHER; note = 2'-O-methyladenosine-3'-phosphate
  modified_base 7: mod_base = OTHER; note = 2'-deoxy-2'-fluoroadenosine-3'-phosphate
  modified_base 8: mod_base = OTHER; note = 2'-O-methylcytidine-3'-phosphate
  modified_base 9: mod_base = OTHER; note = 2'-deoxy-2'-fluoroadenosine-3'-phosphate
  modified_base 10: mod_base = OTHER; note = 2'-deoxy-2'-fluoroadenosine-3'-phosphate
  modified_base 11: mod_base = OTHER; note = 2'-deoxy-2'-fluoroadenosine-3'-phosphate
  modified_base 12: mod_base = OTHER; note = 2'-O-methyladenosine-3'-phosphate
  modified_base 13: mod_base = OTHER; note = 2'-deoxy-2'-fluoroadenosine-3'-phosphate
  modified_base 14: mod_base = OTHER; note = 2'-O-methylguanosine-3'-phosphate
  modified_base 15: mod_base = OTHER; note = 2'-deoxy-2'-fluorouridine-3'-phosphate
  modified_base 16: mod_base = OTHER; note = 2'-O-methylguanosine-3'-phosphate
  modified_base 17: mod_base = OTHER; note = 2'-deoxy-2'-fluoroadenosine-3'-phosphate
  modified_base 18: mod_base = OTHER; note = 2'-O-methyladenosine-3'-phosphate
  modified_base 19: mod_base = OTHER; note = 2'-deoxy-2'-fluoroadenosine-3'-phosphate
  modified_base 20: mod_base = OTHER; note = 2'-O-methyluridine-3'-phosphate
  modified_base 21: mod_base = OTHER; note = 2'-deoxy-2'-fluoroadenosine
acttcaacaaaaagtgaaata

SEQ ID NO: 904 - RNA, 21 nt, synthetic construct
  source 1..21: mol_type = other RNA
  modified_base 1: mod_base = OTHER; note = 2'-deoxy-2'-fluoroguanosine-3'-phosphate
  modified_base 2: mod_base = OTHER; note = 2'-O-methyladenosine-3'-phosphate
  modified_base 3: mod_base = OTHER; note = 2'-deoxy-2'-fluoroguanosine-3'-phosphate
  modified_base 4: mod_base = OTHER; note = 2'-O-methylcytidine-3'-phosphate
  modified_base 5: mod_base = OTHER; note = 2'-deoxy-2'-fluoroadenosine-3'-phosphate
  modified_base 6: mod_base = OTHER; note = 2'-O-methyladenosine-3'-phosphate
  modified_base 7: mod_base = OTHER; note = 2'-deoxy-2'-fluorocytidine-3'-phosphate
  modified_base 8: mod_base = OTHER; note = 2'-O-methyluridine-3'-phosphate
  modified_base 9: mod_base = OTHER; note = 2'-deoxy-2'-fluoroadenosine-3'-phosphate
  modified_base 10: mod_base = OTHER; note = 2'-deoxy-2'-fluoroadenosine-3'-phosphate
  modified_base 11: mod_base = OTHER; note = 2'-deoxy-2'-fluorocytidine-3'-phosphate
  modified_base 12: mod_base = OTHER; note = 2'-O-methyluridine-3'-phosphate
  modified_base 13: mod_base = OTHER; note = 2'-deoxy-2'-fluoroadenosine-3'-phosphate
  modified_base 14: mod_base = OTHER; note = 2'-O-methyladenosine-3'-phosphate
  modified_base 15: mod_base = OTHER; note = 2'-deoxy-2'-fluorocytidine-3'-phosphate
  modified_base 16: mod_base = OTHER; note = 2'-O-methyluridine-3'-phosphate
  modified_base 17: mod_base = OTHER; note = 2'-deoxy-2'-fluorouridine-3'-phosphate
  modified_base 18: mod_base = OTHER; note = 2'-O-methyladenosine-3'-phosphate
  modified_base 19: mod_base = OTHER; note = 2'-deoxy-2'-fluoroadenosine-3'-phosphate
  modified_base 20: mod_base = OTHER; note = 2'-O-methyluridine-3'-phosphate
  modified_base 21: mod_base = OTHER; note = 2'-deoxy-2'-fluorouridine
gagcaactaactaacttaatt

SEQ ID NO: 905 - RNA, 21 nt, synthetic construct
  source 1..21: mol_type = other RNA
  modified_base 1: mod_base = OTHER; note = 2'-deoxy-2'-fluoroadenosine-3'-phosphate
  modified_base 2: mod_base = OTHER; note = 2'-O-methyladenosine-3'-phosphate
  modified_base 3: mod_base = OTHER; note = 2'-deoxy-2'-fluorocytidine-3'-phosphate
  modified_base 4: mod_base = OTHER; note = 2'-O-methylcytidine-3'-phosphate
  modified_base 5: mod_base = OTHER; note = 2'-deoxy-2'-fluoroadenosine-3'-phosphate
  modified_base 6: mod_base = OTHER; note = 2'-O-methyladenosine-3'-phosphate
  modified_base 7: mod_base = OTHER; note = 2'-deoxy-2'-fluorocytidine-3'-phosphate
  modified_base 8: mod_base = OTHER; note = 2'-O-methyladenosine-3'-phosphate
  modified_base 9: mod_base = OTHER; note = 2'-deoxy-2'-fluoroguanosine-3'-phosphate
  modified_base 10: mod_base = OTHER; note = 2'-deoxy-2'-fluorocytidine-3'-phosphate
  modified_base 11: mod_base = OTHER; note = 2'-deoxy-2'-fluoroadenosine-3'-phosphate
  modified_base 12: mod_base = OTHER; note = 2'-O-methyluridine-3'-phosphate
  modified_base 13: mod_base = OTHER; note = 2'-deoxy-2'-fluoroadenosine-3'-phosphate
  modified_base 14: mod_base = OTHER; note = 2'-O-methylguanosine-3'-phosphate
  modified_base 15: mod_base = OTHER; note = 2'-deoxy-2'-fluorouridine-3'-phosphate
  modified_base 16: mod_base = OTHER; note = 2'-O-methylcytidine-3'-phosphate
  modified_base 17: mod_base = OTHER; note = 2'-deoxy-2'-fluoroadenosine-3'-phosphate
  modified_base 18: mod_base = OTHER; note = 2'-O-methyladenosine-3'-phosphate
  modified_base 19: mod_base = OTHER; note = 2'-deoxy-2'-fluoroadenosine-3'-phosphate
  modified_base 20: mod_base = OTHER; note = 2'-O-methyluridine-3'-phosphate
  modified_base 21: mod_base = OTHER; note = 2'-deoxy-2'-fluoroadenosine
aaccaacagcatagtcaaata

SEQ ID NO: 906 - RNA, 21 nt, synthetic construct
  source 1..21: mol_type = other RNA
  modified_base 1: mod_base = OTHER; note = 2'-deoxy-2'-fluoroadenosine-3'-phosphate
  modified_base 2: mod_base = OTHER; note = 2'-O-methylguanosine-3'-phosphate
  modified_base 3: mod_base = OTHER; note = 2'-deoxy-2'-fluorouridine-3'-phosphate
  modified_base 4: mod_base = OTHER; note = 2'-O-methylcytidine-3'-phosphate
  modified_base 5: mod_base = OTHER; note = 2'-deoxy-2'-fluoroadenosine-3'-phosphate
  modified_base 6: mod_base = OTHER; note = 2'-O-methyladenosine-3'-phosphate
  modified_base 7: mod_base = OTHER; note = 2'-deoxy-2'-fluoroadenosine-3'-phosphate
  modified_base 8: mod_base = OTHER; note = 2'-O-methyluridine-3'-phosphate
  modified_base 9: mod_base = OTHER; note = 2'-deoxy-2'-fluoroadenosine-3'-phosphate
  modified_base 10: mod_base = OTHER; note = 2'-deoxy-2'-fluoroadenosine-3'-phosphate
  modified_base 11: mod_base = OTHER; note = 2'-deoxy-2'-fluoroadenosine-3'-phosphate
  modified_base 12: mod_base = OTHER; note = 2'-O-methyladenosine-3'-phosphate
  modified_base 13: mod_base = OTHER; note = 2'-deoxy-2'-fluoroguanosine-3'-phosphate
  modified_base 14: mod_base = OTHER; note = 2'-O-methyladenosine-3'-phosphate
  modified_base 15: mod_base = OTHER; note = 2'-deoxy-2'-fluoroadenosine-3'-phosphate
  modified_base 16: mod_base = OTHER; note = 2'-O-methyladenosine-3'-phosphate
  modified_base 17: mod_base = OTHER; note = 2'-deoxy-2'-fluorouridine-3'-phosphate
  modified_base 18: mod_base = OTHER; note = 2'-O-methyladenosine-3'-phosphate
  modified_base 19: mod_base = OTHER; note = 2'-deoxy-2'-fluoroguanosine-3'-phosphate
  modified_base 20: mod_base = OTHER; note = 2'-O-methyladenosine-3'-phosphate
  modified_base 21: mod_base = OTHER; note = 2'-deoxy-2'-fluoroadenosine
agtcaaataaaagaaatagaa

SEQ ID NO: 907 - RNA, 21 nt, synthetic construct
  source 1..21: mol_type = other RNA
  modified_base 1: mod_base = OTHER; note = 2'-deoxy-2'-fluoroadenosine-3'-phosphate
  modified_base 2: mod_base = OTHER; note = 2'-O-methylguanosine-3'-phosphate
  modified_base 3: mod_base = OTHER; note = 2'-deoxy-2'-fluorouridine-3'-phosphate
  modified_base 4: mod_base = OTHER; note = 2'-O-methylcytidine-3'-phosphate
  modified_base 5: mod_base = OTHER; note = 2'-deoxy-2'-fluoroadenosine-3'-phosphate
  modified_base 6: mod_base = OTHER; note = 2'-O-methyladenosine-3'-phosphate
  modified_base 7: mod_base = OTHER; note = 2'-deoxy-2'-fluoroadenosine-3'-phosphate
  modified_base 8: mod_base = OTHER; note = 2'-O-methyladenosine-3'-phosphate
  modified_base 9: mod_base = OTHER; note = 2'-deoxy-2'-fluoroadenosine-3'-phosphate
  modified_base 10: mod_base = OTHER; note = 2'-deoxy-2'-fluorouridine-3'-phosphate
  modified_base 11: mod_base = OTHER; note = 2'-deoxy-2'-fluoroguanosine-3'-phosphate
  modified_base 12: mod_base = OTHER; note = 2'-O-methyladenosine-3'-phosphate
  modified_base 13: mod_base = OTHER; note = 2'-deoxy-2'-fluoroadenosine-3'-phosphate
  modified_base 14: mod_base = OTHER; note = 2'-O-methylguanosine-3'-phosphate
  modified_base 15: mod_base = OTHER; note = 2'-deoxy-2'-fluoroadenosine-3'-phosphate
  modified_base 16: mod_base = OTHER; note = 2'-O-methylguanosine-3'-phosphate
  modified_base 17: mod_base = OTHER; note = 2'-deoxy-2'-fluoroguanosine-3'-phosphate
  modified_base 18: mod_base = OTHER; note = 2'-O-methyluridine-3'-phosphate
  modified_base 19: mod_base = OTHER; note = 2'-deoxy-2'-fluoroadenosine-3'-phosphate
  modified_base 20: mod_base = OTHER; note = 2'-O-methyladenosine-3'-phosphate
  modified_base 21: mod_base = OTHER; note = 2'-deoxy-2'-fluoroadenosine
agtcaaaaatgaagaggtaaa

SEQ ID NO: 908 - RNA, 21 nt, synthetic construct
  source 1..21: mol_type = other RNA
  modified_base 1: mod_base = OTHER; note = 2'-deoxy-2'-fluorocytidine-3'-phosphate
  modified_base 2: mod_base = OTHER; note = 2'-O-methyluridine-3'-phosphate
  modified_base 3: mod_base = OTHER; note = 2'-deoxy-2'-fluorouridine-3'-phosphate
  modified_base 4: mod_base = OTHER; note = 2'-O-methylguanosine-3'-phosphate
  modified_base 5: mod_base = OTHER; note = 2'-deoxy-2'-fluoroadenosine-3'-phosphate
  modified_base 6: mod_base = OTHER; note = 2'-O-methyladenosine-3'-phosphate
  modified_base 7: mod_base = OTHER; note = 2'-deoxy-2'-fluoroadenosine-3'-phosphate
  modified_base 8: mod_base = OTHER; note = 2'-O-methylguanosine-3'-phosphate
  modified_base 9: mod_base = OTHER; note = 2'-deoxy-2'-fluorocytidine-3'-phosphate
  modified_base 10: mod_base = OTHER; note = 2'-deoxy-2'-fluorocytidine-3'-phosphate
  modified_base 11: mod_base = OTHER; note = 2'-deoxy-2'-fluorouridine-3'-phosphate
  modified_base 12: mod_base = OTHER; note = 2'-O-methylcytidine-3'-phosphate
  modified_base 13: mod_base = OTHER; note = 2'-deoxy-2'-fluorocytidine-3'-phosphate
  modified_base 14: mod_base = OTHER; note = 2'-O-methyluridine-3'-phosphate
  modified_base 15: mod_base = OTHER; note = 2'-deoxy-2'-fluoroadenosine-3'-phosphate
  modified_base 16: mod_base = OTHER; note = 2'-O-methylguanosine-3'-phosphate
  modified_base 17: mod_base = OTHER; note = 2'-deoxy-2'-fluoroadenosine-3'-phosphate
  modified_base 18: mod_base = OTHER; note = 2'-O-methyladenosine-3'-phosphate
  modified_base 19: mod_base = OTHER; note = 2'-deoxy-2'-fluoroguanosine-3'-phosphate
  modified_base 20: mod_base = OTHER; note = 2'-O-methyladenosine-3'-phosphate
  modified_base 21: mod_base = OTHER; note = 2'-deoxy-2'-fluoroadenosine
cttgaaagcctcctagaagaa

SEQ ID NO: 909 - RNA, 21 nt, synthetic construct
  source 1..21: mol_type = other RNA
  modified_base 1: mod_base = OTHER; note = 2'-deoxy-2'-fluorocytidine-3'-phosphate
  modified_base 2: mod_base = OTHER; note = 2'-O-methyluridine-3'-phosphate
  modified_base 3: mod_base = OTHER; note = 2'-deoxy-2'-fluorouridine-3'-phosphate
  modified_base 4: mod_base = OTHER; note = 2'-O-methylcytidine-3'-phosphate
  modified_base 5: mod_base = OTHER; note = 2'-deoxy-2'-fluoroadenosine-3'-phosphate
  modified_base 6: mod_base = OTHER; note = 2'-O-methyladenosine-3'-phosphate
  modified_base 7: mod_base = OTHER; note = 2'-deoxy-2'-fluorocytidine-3'-phosphate
  modified_base 8: mod_base = OTHER; note = 2'-O-methyladenosine-3'-phosphate
  modified_base 9: mod_base = OTHER; note = 2'-deoxy-2'-fluoroadenosine-3'-phosphate
  modified_base 10: mod_base = OTHER; note = 2'-deoxy-2'-fluoroadenosine-3'-phosphate
  modified_base 11: mod_base = OTHER; note = 2'-deoxy-2'-fluoroadenosine-3'-phosphate
  modified_base 12: mod_base = OTHER; note = 2'-O-methyladenosine-3'-phosphate
  modified_base 13: mod_base = OTHER; note = 2'-deoxy-2'-fluoroguanosine-3'-phosphate
  modified_base 14: mod_base = OTHER; note = 2'-O-methyluridine-3'-phosphate
  modified_base 15: mod_base = OTHER; note = 2'-deoxy-2'-fluoroguanosine-3'-phosphate
  modified_base 16: mod_base = OTHER; note = 2'-O-methyladenosine-3'-phosphate
  modified_base 17: mod_base = OTHER; note = 2'-deoxy-2'-fluoroadenosine-3'-phosphate
  modified_base 18: mod_base = OTHER; note = 2'-O-methyladenosine-3'-phosphate
  modified_base 19: mod_base = OTHER; note = 2'-deoxy-2'-fluorouridine-3'-phosphate
  modified_base 20: mod_base = OTHER; note = 2'-O-methyladenosine-3'-phosphate
  modified_base 21: mod_base = OTHER; note = 2'-deoxy-2'-fluorouridine
cttcaacaaaaagtgaaatat

SEQ ID NO: 910 - RNA, 21 nt, synthetic construct
  source 1..21: mol_type = other RNA
  modified_base 1: mod_base = OTHER; note = 2'-deoxy-2'-fluorocytidine-3'-phosphate
  modified_base 2: mod_base = OTHER; note = 2'-O-methyladenosine-3'-phosphate
  modified_base 3: mod_base = OTHER; note = 2'-deoxy-2'-fluoroadenosine-3'-phosphate
  modified_base 4: mod_base = OTHER; note = 2'-O-methylcytidine-3'-phosphate
  modified_base 5: mod_base = OTHER; note = 2'-deoxy-2'-fluorouridine-3'-phosphate
  modified_base 6: mod_base = OTHER; note = 2'-O-methyladenosine-3'-phosphate
  modified_base 7: mod_base = OTHER; note = 2'-deoxy-2'-fluoroadenosine-3'-phosphate
  modified_base 8: mod_base = OTHER; note = 2'-O-methylcytidine-3'-phosphate
  modified_base 9: mod_base = OTHER; note = 2'-deoxy-2'-fluorouridine-3'-phosphate
  modified_base 10: mod_base = OTHER; note = 2'-deoxy-2'-fluoroadenosine-3'-phosphate
  modified_base 11: mod_base = OTHER; note = 2'-deoxy-2'-fluoroadenosine-3'-phosphate
  modified_base 12: mod_base = OTHER; note = 2'-O-methylcytidine-3'-phosphate
  modified_base 13: mod_base = OTHER; note = 2'-deoxy-2'-fluorouridine-3'-phosphate
  modified_base 14: mod_base = OTHER; note = 2'-O-methyluridine-3'-phosphate
  modified_base 15: mod_base = OTHER; note = 2'-deoxy-2'-fluoroadenosine-3'-phosphate
  modified_base 16: mod_base = OTHER; note = 2'-O-methyladenosine-3'-phosphate
  modified_base 17: mod_base = OTHER; note = 2'-deoxy-2'-fluorouridine-3'-phosphate
  modified_base 18: mod_base = OTHER; note = 2'-O-methyluridine-3'-phosphate
  modified_base 19: mod_base = OTHER; note = 2'-deoxy-2'-fluorocytidine-3'-phosphate
  modified_base 20: mod_base = OTHER; note = 2'-O-methyladenosine-3'-phosphate
  modified_base 21: mod_base = OTHER; note = 2'-deoxy-2'-fluoroadenosine
caactaactaacttaattcaa

SEQ ID NO: 911 - RNA, 21 nt, synthetic construct
  source 1..21: mol_type = other RNA
  modified_base 1: mod_base = OTHER; note = 2'-deoxy-2'-fluoroadenosine-3'-phosphate
  modified_base 2: mod_base = OTHER; note = 2'-O-methylcytidine-3'-phosphate
  modified_base 3: mod_base = OTHER; note = 2'-deoxy-2'-fluorocytidine-3'-phosphate
  modified_base 4: mod_base = OTHER; note = 2'-O-methyladenosine-3'-phosphate
  modified_base 5: mod_base = OTHER; note = 2'-deoxy-2'-fluoroadenosine-3'-phosphate
  modified_base 6: mod_base = OTHER; note = 2'-O-methylcytidine-3'-phosphate
  modified_base 7: mod_base = OTHER; note = 2'-deoxy-2'-fluoroadenosine-3'-phosphate
  modified_base 8: mod_base = OTHER; note = 2'-O-methylguanosine-3'-phosphate
  modified_base 9: mod_base = OTHER; note = 2'-deoxy-2'-fluorocytidine-3'-phosphate
  modified_base 10: mod_base = OTHER; note = 2'-deoxy-2'-fluoroadenosine-3'-phosphate
  modified_base 11: mod_base = OTHER; note = 2'-deoxy-2'-fluorouridine-3'-phosphate
  modified_base 12: mod_base = OTHER; note = 2'-O-methyladenosine-3'-phosphate
  modified_base 13: mod_base = OTHER; note = 2'-deoxy-2'-fluoroguanosine-3'-phosphate
  modified_base 14: mod_base = OTHER; note = 2'-O-methyluridine-3'-phosphate
  modified_base 15: mod_base = OTHER; note = 2'-deoxy-2'-fluorocytidine-3'-phosphate
  modified_base 16: mod_base = OTHER; note = 2'-O-methyladenosine-3'-phosphate
  modified_base 17: mod_base = OTHER; note = 2'-deoxy-2'-fluoroadenosine-3'-phosphate
  modified_base 18: mod_base = OTHER; note = 2'-O-methyladenosine-3'-phosphate
  modified_base 19: mod_base = OTHER; note = 2'-deoxy-2'-fluorouridine-3'-phosphate
  modified_base 20: mod_base = OTHER; note = 2'-O-methyladenosine-3'-phosphate
  modified_base 21: mod_base = OTHER; note = 2'-deoxy-2'-fluoroadenosine
accaacagcatagtcaaataa

SEQ ID NO: 912 - RNA, 21 nt, synthetic construct
  source 1..21: mol_type = other RNA
  modified_base 1: mod_base = OTHER; note = 2'-deoxy-2'-fluoroguanosine-3'-phosphate
  modified_base 2: mod_base = OTHER; note = 2'-O-methyladenosine-3'-phosphate
  modified_base 3: mod_base = OTHER; note = 2'-deoxy-2'-fluoroadenosine-3'-phosphate
  modified_base 4: mod_base = OTHER; note = 2'-O-methylcytidine-3'-phosphate
  modified_base 5: mod_base = OTHER; note = 2'-deoxy-2'-fluorocytidine-3'-phosphate
  modified_base 6: mod_base = OTHER; note = 2'-O-methylcytidine-3'-phosphate
  modified_base 7: mod_base = OTHER; note = 2'-deoxy-2'-fluoroadenosine-3'-phosphate
  modified_base 8: mod_base = OTHER; note = 2'-O-methylcytidine-3'-phosphate
  modified_base 9: mod_base = OTHER; note = 2'-deoxy-2'-fluoroadenosine-3'-phosphate
  modified_base 10: mod_base = OTHER; note = 2'-deoxy-2'-fluoroguanosine-3'-phosphate
  modified_base 11: mod_base = OTHER; note = 2'-deoxy-2'-fluoroadenosine-3'-phosphate
  modified_base 12: mod_base = OTHER; note = 2'-O-methyladenosine-3'-phosphate
  modified_base 13: mod_base = OTHER; note = 2'-deoxy-2'-fluoroadenosine-3'-phosphate
  modified_base 14: mod_base = OTHER; note = 2'-O-methyluridine-3'-phosphate
  modified_base 15: mod_base = OTHER; note = 2'-deoxy-2'-fluorouridine-3'-phosphate
  modified_base 16: mod_base = OTHER; note = 2'-O-methyluridine-3'-phosphate
  modified_base 17: mod_base = OTHER; note = 2'-deoxy-2'-fluorocytidine-3'-phosphate
  modified_base 18: mod_base = OTHER; note = 2'-O-methyluridine-3'-phosphate
  modified_base 19: mod_base = OTHER; note = 2'-deoxy-2'-fluorocytidine-3'-phosphate
  modified_base 20: mod_base = OTHER; note = 2'-O-methyluridine-3'-phosphate
  modified_base 21: mod_base = OTHER; note = 2'-deoxy-2'-fluoroadenosine
gaacccacagaaatttctcta

SEQ ID NO: 913 - RNA, 21 nt, synthetic construct
  source 1..21: mol_type = other RNA
  modified_base 1: mod_base = OTHER; note = 2'-deoxy-2'-fluoroguanosine-3'-phosphate
  modified_base 2: mod_base = OTHER; note = 2'-O-methyladenosine-3'-phosphate
  modified_base 3: mod_base = OTHER; note = 2'-deoxy-2'-fluoroadenosine-3'-phosphate
  modified_base 4: mod_base = OTHER; note = 2'-O-methyluridine-3'-phosphate
  modified_base 5: mod_base = OTHER; note = 2'-deoxy-2'-fluoroadenosine-3'-phosphate
  modified_base 6: mod_base = OTHER; note = 2'-O-methyluridine-3'-phosphate
  modified_base 7: mod_base = OTHER; note = 2'-deoxy-2'-fluoroguanosine-3'-phosphate
  modified_base 8: mod_base = OTHER; note = 2'-O-methyluridine-3'-phosphate
  modified_base 9: mod_base = OTHER; note = 2'-deoxy-2'-fluorocytidine-3'-phosphate
  modified_base 10: mod_base = OTHER; note = 2'-deoxy-2'-fluoroadenosine-3'-phosphate
  modified_base 11: mod_base = OTHER; note = 2'-deoxy-2'-fluorocytidine-3'-phosphate
  modified_base 12: mod_base = OTHER; note = 2'-O-methyluridine-3'-phosphate
  modified_base 13: mod_base = OTHER; note = 2'-deoxy-2'-fluorouridine-3'-phosphate
  modified_base 14: mod_base = OTHER; note = 2'-O-methylguanosine-3'-phosphate
  modified_base 15: mod_base = OTHER; note = 2'-deoxy-2'-fluoroadenosine-3'-phosphate
  modified_base 16: mod_base = OTHER; note = 2'-O-methyladenosine-3'-phosphate
  modified_base 17: mod_base = OTHER; note = 2'-deoxy-2'-fluorocytidine-3'-phosphate
  modified_base 18: mod_base = OTHER; note = 2'-O-methyluridine-3'-phosphate
  modified_base 19: mod_base = OTHER; note = 2'-deoxy-2'-fluorocytidine-3'-phosphate
  modified_base 20: mod_base = OTHER; note = 2'-O-methyladenosine-3'-phosphate
  modified_base 21: mod_base = OTHER; note = 2'-deoxy-2'-fluoroadenosine
gaatatgtcacttgaactcaa

SEQ ID NO: 914 - RNA, 21 nt, synthetic construct
  source 1..21: mol_type = other RNA
  modified_base 1: mod_base = OTHER; note = 2'-deoxy-2'-fluorouridine-3'-phosphate
  modified_base 2: mod_base = OTHER; note = 2'-O-methylguanosine-3'-phosphate
  modified_base 3: mod_base = OTHER; note = 2'-deoxy-2'-fluoroadenosine-3'-phosphate
  modified_base 4: mod_base = OTHER; note = 2'-O-methyladenosine-3'-phosphate
  modified_base 5: mod_base = OTHER; note = 2'-deoxy-2'-fluoroadenosine-3'-phosphate
  modified_base 6: mod_base = OTHER; note = 2'-O-methylguanosine-3'-phosphate
  modified_base 7: mod_base = OTHER; note = 2'-deoxy-2'-fluorocytidine-3'-phosphate
  modified_base 8: mod_base = OTHER; note = 2'-O-methylcytidine-3'-phosphate
  modified_base 9: mod_base = OTHER; note = 2'-deoxy-2'-fluorouridine-3'-phosphate
  modified_base 10: mod_base = OTHER; note = 2'-deoxy-2'-fluorocytidine-3'-phosphate
  modified_base 11: mod_base = OTHER; note = 2'-deoxy-2'-fluorocytidine-3'-phosphate
  modified_base 12: mod_base = OTHER; note = 2'-O-methyluridine-3'-phosphate
  modified_base 13: mod_base = OTHER; note = 2'-deoxy-2'-fluoroadenosine-3'-phosphate
  modified_base 14: mod_base = OTHER; note = 2'-O-methylguanosine-3'-phosphate
  modified_base 15: mod_base = OTHER; note = 2'-deoxy-2'-fluoroadenosine-3'-phosphate
  modified_base 16: mod_base = OTHER; note = 2'-O-methyladenosine-3'-phosphate
  modified_base 17: mod_base = OTHER; note = 2'-deoxy-2'-fluoroguanosine-3'-phosphate
  modified_base 18: mod_base = OTHER; note = 2'-O-methyladenosine-3'-phosphate
  modified_base 19: mod_base = OTHER; note = 2'-deoxy-2'-fluoroadenosine-3'-phosphate
  modified_base 20: mod_base = OTHER; note = 2'-O-methyladenosine-3'-phosphate
  modified_base 21: mod_base = OTHER; note = 2'-deoxy-2'-fluoroadenosine
tgaaagcctcctagaagaaaa

SEQ ID NO: 915 - RNA, 21 nt, synthetic construct
  source 1..21: mol_type = other RNA
  modified_base 1: mod_base = OTHER; note = 2'-deoxy-2'-fluorouridine-3'-phosphate
  modified_base 2: mod_base = OTHER; note = 2'-O-methyluridine-3'-phosphate
  modified_base 3: mod_base = OTHER; note = 2'-deoxy-2'-fluorocytidine-3'-phosphate
  modified_base 4: mod_base = OTHER; note = 2'-O-methyladenosine-3'-phosphate
  modified_base 5: mod_base = OTHER; note = 2'-deoxy-2'-fluoroadenosine-3'-phosphate
  modified_base 6: mod_base = OTHER; note = 2'-O-methylcytidine-3'-phosphate
  modified_base 7: mod_base = OTHER; note = 2'-deoxy-2'-fluoroadenosine-3'-phosphate
  modified_base 8: mod_base = OTHER; note = 2'-O-methyladenosine-3'-phosphate
  modified_base 9: mod_base = OTHER; note = 2'-deoxy-2'-fluoroadenosine-3'-phosphate
  modified_base 10: mod_base = OTHER; note = 2'-deoxy-2'-fluoroadenosine-3'-phosphate
  modified_base 11: mod_base = OTHER; note = 2'-deoxy-2'-fluoroadenosine-3'-phosphate
  modified_base 12: mod_base = OTHER; note = 2'-O-methylguanosine-3'-phosphate
  modified_base 13: mod_base = OTHER; note = 2'-deoxy-2'-fluorouridine-3'-phosphate
  modified_base 14: mod_base = OTHER; note = 2'-O-methylguanosine-3'-phosphate
  modified_base 15: mod_base = OTHER; note = 2'-deoxy-2'-fluoroadenosine-3'-phosphate
  modified_base 16: mod_base = OTHER; note = 2'-O-methyladenosine-3'-phosphate
  modified_base 17: mod_base = OTHER; note = 2'-deoxy-2'-fluoroadenosine-3'-phosphate
  modified_base 18: mod_base = OTHER; note = 2'-O-methyluridine-3'-phosphate
  modified_base 19: mod_base = OTHER; note = 2'-deoxy-2'-fluoroadenosine-3'-phosphate
  modified_base 20: mod_base = OTHER; note = 2'-O-methyluridine-3'-phosphate
  modified_base 21: mod_base = OTHER; note = 2'-deoxy-2'-fluorouridine
ttcaacaaaaagtgaaatatt

SEQ ID NO: 916 - RNA, 21 nt, synthetic construct
  source 1..21: mol_type = other RNA
  modified_base 1: mod_base = OTHER; note = 2'-deoxy-2'-fluoroadenosine-3'-phosphate
  modified_base 2: mod_base = OTHER; note = 2'-O-methyladenosine-3'-phosphate
  modified_base 3: mod_base = OTHER; note = 2'-deoxy-2'-fluorocytidine-3'-phosphate
  modified_base 4: mod_base = OTHER; note = 2'-O-methyluridine-3'-phosphate
  modified_base 5: mod_base = OTHER; note = 2'-deoxy-2'-fluoroadenosine-3'-phosphate
  modified_base 6: mod_base = OTHER; note = 2'-O-methyladenosine-3'-phosphate
  modified_base 7: mod_base = OTHER; note = 2'-deoxy-2'-fluorocytidine-3'-phosphate
  modified_base 8: mod_base = OTHER; note = 2'-O-methyluridine-3'-phosphate
  modified_base 9: mod_base = OTHER; note = 2'-deoxy-2'-fluoroadenosine-3'-phosphate
  modified_base 10: mod_base = OTHER; note = 2'-deoxy-2'-fluoroadenosine-3'-phosphate
  modified_base 11: mod_base = OTHER; note = 2'-deoxy-2'-fluorocytidine-3'-phosphate
  modified_base 12: mod_base = OTHER; note = 2'-O-methyluridine-3'-phosphate
  modified_base 13: mod_base = OTHER; note = 2'-deoxy-2'-fluorouridine-3'-phosphate
  modified_base 14: mod_base = OTHER; note = 2'-O-methyladenosine-3'-phosphate
  modified_base 15: mod_base = OTHER; note = 2'-deoxy-2'-fluoroadenosine-3'-phosphate
  modified_base 16: mod_base = OTHER; note = 2'-O-methyluridine-3'-phosphate
  modified_base 17: mod_base = OTHER; note = 2'-deoxy-2'-fluorouridine-3'-phosphate
  modified_base 18: mod_base = OTHER; note = 2'-O-methylcytidine-3'-phosphate
  modified_base 19: mod_base = OTHER; note = 2'-deoxy-2'-fluoroadenosine-3'-phosphate
  modified_base 20: mod_base = OTHER; note = 2'-O-methyladenosine-3'-phosphate
  modified_base 21: mod_base = OTHER; note = 2'-deoxy-2'-fluoroadenosine
aactaactaacttaattcaaa

SEQ ID NO: 917 - RNA, 21 nt, synthetic construct
  source 1..21: mol_type = other RNA
  modified_base 1: mod_base = OTHER; note = 2'-deoxy-2'-fluorocytidine-3'-phosphate
  modified_base 2: mod_base = OTHER; note = 2'-O-methylcytidine-3'-phosphate
  modified_base 3: mod_base = OTHER; note = 2'-deoxy-2'-fluoroadenosine-3'-phosphate
  modified_base 4: mod_base = OTHER; note = 2'-O-methyladenosine-3'-phosphate
  modified_base 5: mod_base = OTHER; note = 2'-deoxy-2'-fluorocytidine-3'-phosphate
  modified_base 6: mod_base = OTHER; note = 2'-O-methyladenosine-3'-phosphate
  modified_base 7: mod_base = OTHER; note = 2'-deoxy-2'-fluoroguanosine-3'-phosphate
  modified_base 8: mod_base = OTHER; note = 2'-O-methylcytidine-3'-phosphate
  modified_base 9: mod_base = OTHER; note = 2'-deoxy-2'-fluoroadenosine-3'-phosphate
  modified_base 10: mod_base = OTHER; note = 2'-deoxy-2'-fluorouridine-3'-phosphate
  modified_base 11: mod_base = OTHER; note = 2'-deoxy-2'-fluoroadenosine-3'-phosphate
  modified_base 12: mod_base = OTHER; note = 2'-O-methylguanosine-3'-phosphate
  modified_base 13: mod_base = OTHER; note = 2'-deoxy-2'-fluorouridine-3'-phosphate
  modified_base 14: mod_base = OTHER; note = 2'-O-methylcytidine-3'-phosphate
  modified_base 15: mod_base = OTHER; note = 2'-deoxy-2'-fluoroadenosine-3'-phosphate
  modified_base 16: mod_base = OTHER; note = 2'-O-methyladenosine-3'-phosphate
  modified_base 17: mod_base = OTHER; note = 2'-deoxy-2'-fluoroadenosine-3'-phosphate
  modified_base 18: mod_base = OTHER; note = 2'-O-methyluridine-3'-phosphate
  modified_base 19: mod_base = OTHER; note = 2'-deoxy-2'-fluoroadenosine-3'-phosphate
  modified_base 20: mod_base = OTHER; note = 2'-O-methyladenosine-3'-phosphate
  modified_base 21: mod_base = OTHER; note = 2'-deoxy-2'-fluoroadenosine
ccaacagcatagtcaaataaa

SEQ ID NO: 918 - RNA, 21 nt, synthetic construct
  source 1..21: mol_type = other RNA
  modified_base 1: mod_base = OTHER; note = 2'-deoxy-2'-fluoroadenosine-3'-phosphate
  modified_base 2: mod_base = OTHER; note = 2'-O-methyladenosine-3'-phosphate
  modified_base 3: mod_base = OTHER; note = 2'-deoxy-2'-fluorocytidine-3'-phosphate
  modified_base 4: mod_base = OTHER; note = 2'-O-methylcytidine-3'-phosphate
  modified_base 5: mod_base = OTHER; note = 2'-deoxy-2'-fluorocytidine-3'-phosphate
  modified_base 6: mod_base = OTHER; note = 2'-O-methyladenosine-3'-phosphate
  modified_base 7: mod_base = OTHER; note = 2'-deoxy-2'-fluorocytidine-3'-phosphate
  modified_base 8: mod_base = OTHER; note = 2'-O-methyladenosine-3'-phosphate
  modified_base 9: mod_base = OTHER; note = 2'-deoxy-2'-fluoroguanosine-3'-phosphate
  modified_base 10: mod_base = OTHER; note = 2'-deoxy-2'-fluoroadenosine-3'-phosphate
  modified_base 11: mod_base = OTHER; note = 2'-deoxy-2'-fluoroadenosine-3'-phosphate
  modified_base 12: mod_base = OTHER; note = 2'-O-methyladenosine-3'-phosphate
  modified_base 13: mod_base = OTHER; note = 2'-deoxy-2'-fluorouridine-3'-phosphate
  modified_base 14: mod_base = OTHER; note = 2'-O-methyluridine-3'-phosphate
  modified_base 15: mod_base = OTHER; note = 2'-deoxy-2'-fluorouridine-3'-phosphate
  modified_base 16: mod_base = OTHER; note = 2'-O-methylcytidine-3'-phosphate
  modified_base 17: mod_base = OTHER; note = 2'-deoxy-2'-fluorouridine-3'-phosphate
  modified_base 18: mod_base = OTHER; note = 2'-O-methylcytidine-3'-phosphate
  modified_base 19: mod_base = OTHER; note = 2'-deoxy-2'-fluorouridine-3'-phosphate
  modified_base 20: mod_base = OTHER; note = 2'-O-methyladenosine-3'-phosphate
  modified_base 21: mod_base = OTHER; note = 2'-deoxy-2'-fluorouridine
aacccacagaaatttctctat

SEQ ID NO: 919 - RNA, 21 nt, synthetic construct
  source 1..21: mol_type = other RNA
  modified_base 1: mod_base = OTHER; note = 2'-deoxy-2'-fluorouridine-3'-phosphate
  modified_base 2: mod_base = OTHER; note = 2'-O-methylguanosine-3'-phosphate
  modified_base 3: mod_base = OTHER; note = 2'-deoxy-2'-fluorouridine-3'-phosphate
  modified_base 4: mod_base = OTHER; note = 2'-O-methylcytidine-3'-phosphate
  modified_base 5: mod_base = OTHER; note = 2'-deoxy-2'-fluoroadenosine-3'-phosphate
  modified_base 6: mod_base = OTHER; note = 2'-O-methylcytidine-3'-phosphate
  modified_base 7: mod_base = OTHER; note = 2'-deoxy-2'-fluorouridine-3'-phosphate
  modified_base 8: mod_base = OTHER; note = 2'-O-methyluridine-3'-phosphate
  modified_base 9: mod_base = OTHER; note = 2'-deoxy-2'-fluoroguanosine-3'-phosphate
  modified_base 10: mod_base = OTHER; note = 2'-deoxy-2'-fluoroadenosine-3'-phosphate
  modified_base 11: mod_base = OTHER; note = 2'-deoxy-2'-fluoroadenosine-3'-phosphate
  modified_base 12: mod_base = OTHER; note = 2'-O-methylcytidine-3'-phosphate
  modified_base 13: mod_base = OTHER; note = 2'-deoxy-2'-fluorouridine-3'-phosphate
  modified_base 14: mod_base = OTHER; note = 2'-O-methylcytidine-3'-phosphate
  modified_base 15: mod_base = OTHER; note = 2'-deoxy-2'-fluoroadenosine-3'-phosphate
  modified_base 16: mod_base = OTHER; note = 2'-O-methyladenosine-3'-phosphate
  modified_base 17: mod_base = OTHER; note = 2'-deoxy-2'-fluorocytidine-3'-phosphate
  modified_base 18: mod_base = OTHER; note = 2'-O-methyluridine-3'-phosphate
  modified_base 19: mod_base = OTHER; note = 2'-deoxy-2'-fluorocytidine-3'-phosphate
  modified_base 20: mod_base = OTHER; note = 2'-O-methyladenosine-3'-phosphate
  modified_base 21: mod_base = OTHER; note = 2'-deoxy-2'-fluoroadenosine
tgtcacttgaactcaactcaa

SEQ ID NO: 920 - RNA, 21 nt, synthetic construct
  source 1..21: mol_type = other RNA
  modified_base 1: mod_base = OTHER; note = 2'-deoxy-2'-fluoroguanosine-3'-phosphate
  modified_base 2: mod_base = OTHER; note = 2'-O-methyladenosine-3'-phosphate
  modified_base 3: mod_base = OTHER; note = 2'-deoxy-2'-fluoroadenosine-3'-phosphate
  modified_base 4: mod_base = OTHER; note = 2'-O-methyladenosine-3'-phosphate
  modified_base 5: mod_base = OTHER; note = 2'-deoxy-2'-fluoroguanosine-3'-phosphate
  modified_base 6: mod_base = OTHER; note = 2'-O-methylcytidine-3'-phosphate
  modified_base 7: mod_base = OTHER; note = 2'-deoxy-2'-fluorocytidine-3'-phosphate
  modified_base 8: mod_base = OTHER; note = 2'-O-methyluridine-3'-phosphate
  modified_base 9: mod_base = OTHER; note = 2'-deoxy-2'-fluorocytidine-3'-phosphate
  modified_base 10: mod_base = OTHER; note = 2'-deoxy-2'-fluorocytidine-3'-phosphate
  modified_base 11: mod_base = OTHER; note = 2'-deoxy-2'-fluorouridine-3'-phosphate
  modified_base 12: mod_base = OTHER; note = 2'-O-methyladenosine-3'-phosphate
  modified_base 13: mod_base = OTHER; note = 2'-deoxy-2'-fluoroguanosine-3'-phosphate
  modified_base 14: mod_base = OTHER; note = 2'-O-methyladenosine-3'-phosphate
  modified_base 15: mod_base = OTHER; note = 2'-deoxy-2'-fluoroadenosine-3'-phosphate
  modified_base 16: mod_base = OTHER; note = 2'-O-methylguanosine-3'-phosphate
  modified_base 17: mod_base = OTHER; note = 2'-deoxy-2'-fluoroadenosine-3'-phosphate
  modified_base 18: mod_base = OTHER; note = 2'-O-methyladenosine-3'-phosphate
  modified_base 19: mod_base = OTHER; note = 2'-deoxy-2'-fluoroadenosine-3'-phosphate
  modified_base 20: mod_base = OTHER; note = 2'-O-methyladenosine-3'-phosphate
  modified_base 21: mod_base = OTHER; note = 2'-deoxy-2'-fluoroadenosine
gaaagcctcctagaagaaaaa

SEQ ID NO: 921 - RNA, 21 nt, synthetic construct
  source 1..21: mol_type = other RNA
  modified_base 1: mod_base = OTHER; note = 2'-deoxy-2'-fluoroadenosine-3'-phosphate
  modified_base 2: mod_base = OTHER; note = 2'-O-methyladenosine-3'-phosphate
  modified_base 3: mod_base = OTHER; note = 2'-deoxy-2'-fluorouridine-3'-phosphate
  modified_base 4: mod_base = OTHER; note = 2'-O-methyladenosine-3'-phosphate
  modified_base 5: mod_base = OTHER; note = 2'-deoxy-2'-fluorouridine-3'-phosphate
  modified_base 6: mod_base = OTHER; note = 2'-O-methyluridine-3'-phosphate
  modified_base 7: mod_base = OTHER; note = 2'-deoxy-2'-fluorouridine-3'-phosphate
  modified_base 8: mod_base = OTHER; note = 2'-O-methyladenosine-3'-phosphate
  modified_base 9: mod_base = OTHER; note = 2'-deoxy-2'-fluoroguanosine-3'-phosphate
  modified_base 10: mod_base = OTHER; note = 2'-deoxy-2'-fluoroadenosine-3'-phosphate
  modified_base 11: mod_base = OTHER; note = 2'-deoxy-2'-fluoroadenosine-3'-phosphate
  modified_base 12: mod_base = OTHER; note = 2'-O-methylguanosine-3'-phosphate
  modified_base 13: mod_base = OTHER; note = 2'-deoxy-2'-fluoroadenosine-3'-phosphate
  modified_base 14: mod_base = OTHER; note = 2'-O-methylguanosine-3'-phosphate
  modified_base 15: mod_base = OTHER; note = 2'-deoxy-2'-fluorocytidine-3'-phosphate
  modified_base 16: mod_base = OTHER; note = 2'-O-methyladenosine-3'-phosphate
  modified_base 17: mod_base = OTHER; note = 2'-deoxy-2'-fluoroadenosine-3'-phosphate
  modified_base 18: mod_base = OTHER; note = 2'-O-methylcytidine-3'-phosphate
  modified_base 19: mod_base = OTHER; note = 2'-deoxy-2'-fluorouridine-3'-phosphate
  modified_base 20: mod_base = OTHER; note = 2'-O-methyladenosine-3'-phosphate
  modified_base 21: mod_base = OTHER; note = 2'-deoxy-2'-fluoroadenosine
aatatttagaagagcaactaa

SEQ ID NO: 922 - RNA, 21 nt, synthetic construct
  source 1..21: mol_type = other RNA
  modified_base 1: mod_base = OTHER; note = 2'-deoxy-2'-fluoroadenosine-3'-phosphate
  modified_base 2: mod_base = OTHER; note = 2'-O-methylcytidine-3'-phosphate
  modified_base 3: mod_base = OTHER; note = 2'-deoxy-2'-fluorouridine-3'-phosphate
  modified_base 4: mod_base = OTHER; note = 2'-O-methyladenosine-3'-phosphate
  modified_base 5: mod_base = OTHER; note = 2'-deoxy-2'-fluoroadenosine-3'-phosphate
  modified_base 6: mod_base = OTHER; note = 2'-O-methylcytidine-3'-phosphate
  modified_base 7: mod_base = OTHER; note = 2'-deoxy-2'-fluorouridine-3'-phosphate
  modified_base 8: mod_base = OTHER; note = 2'-O-methyladenosine-3'-phosphate
  modified_base 9: mod_base = OTHER; note = 2'-deoxy-2'-fluoroadenosine-3'-phosphate
  modified_base 10: mod_base = OTHER; note = 2'-deoxy-2'-fluorocytidine-3'-phosphate
  modified_base 11: mod_base = OTHER; note = 2'-deoxy-2'-fluorouridine-3'-phosphate
  modified_base 12: mod_base = OTHER; note = 2'-O-methyluridine-3'-phosphate
  modified_base 13: mod_base = OTHER; note = 2'-deoxy-2'-fluoroadenosine-3'-phosphate
  modified_base 14: mod_base = OTHER; note = 2'-O-methyladenosine-3'-phosphate
  modified_base 15: mod_base = OTHER; note = 2'-deoxy-2'-fluorouridine-3'-phosphate
  modified_base 16: mod_base = OTHER; note = 2'-O-methyluridine-3'-phosphate
  modified_base 17: mod_base = OTHER; note = 2'-deoxy-2'-fluorocytidine-3'-phosphate
  modified_base 18: mod_base = OTHER; note = 2'-O-methyladenosine-3'-phosphate
  modified_base 19: mod_base = OTHER; note = 2'-deoxy-2'-fluoroadenosine-3'-phosphate
  modified_base 20: mod_base = OTHER; note = 2'-O-methyladenosine-3'-phosphate
  modified_base 21: mod_base = OTHER; note = 2'-deoxy-2'-fluoroadenosine
actaactaacttaattcaaaa

SEQ ID NO: 923 - RNA, 21 nt, synthetic construct
  source 1..21: mol_type = other RNA
  modified_base 1: mod_base = OTHER; note = 2'-deoxy-2'-fluorocytidine-3'-phosphate
  modified_base 2: mod_base = OTHER; note = 2'-O-methyladenosine-3'-phosphate
  modified_base 3: mod_base = OTHER; note = 2'-deoxy-2'-fluoroadenosine-3'-phosphate
  modified_base 4: mod_base = OTHER; note = 2'-O-methylcytidine-3'-phosphate
  modified_base 5: mod_base = OTHER; note = 2'-deoxy-2'-fluoroadenosine-3'-phosphate
  modified_base 6: mod_base = OTHER; note = 2'-O-methylguanosine-3'-phosphate
  modified_base 7: mod_base = OTHER; note = 2'-deoxy-2'-fluorocytidine-3'-phosphate
  modified_base 8: mod_base = OTHER; note = 2'-O-methyladenosine-3'-phosphate
  modified_base 9: mod_base = OTHER; note = 2'-deoxy-2'-fluorouridine-3'-phosphate
  modified_base 10: mod_base = OTHER; note = 2'-deoxy-2'-fluoroadenosine-3'-phosphate
  modified_base 11: mod_base = OTHER; note = 2'-deoxy-2'-fluoroguanosine-3'-phosphate
  modified_base 12: mod_base = OTHER; note = 2'-O-methyluridine-3'-phosphate
  modified_base 13: mod_base = OTHER; note = 2'-deoxy-2'-fluorocytidine-3'-phosphate
  modified_base 14: mod_base = OTHER; note = 2'-O-methyladenosine-3'-phosphate
  modified_base 15: mod_base = OTHER; note = 2'-deoxy-2'-fluoroadenosine-3'-phosphate
  modified_base 16: mod_base = OTHER; note = 2'-O-methyladenosine-3'-phosphate
  modified_base 17: mod_base = OTHER; note = 2'-deoxy-2'-fluorouridine-3'-phosphate
  modified_base 18: mod_base = OTHER; note = 2'-O-methyladenosine-3'-phosphate
  modified_base 19: mod_base = OTHER; note = 2'-deoxy-2'-fluoroadenosine-3'-phosphate
  modified_base 20: mod_base = OTHER; note = 2'-O-methyladenosine-3'-phosphate
  modified_base 21: mod_base = OTHER; note = 2'-deoxy-2'-fluoroadenosine
caacagcatagtcaaataaaa

SEQ ID NO: 924 - RNA, 21 nt, synthetic construct
  source 1..21: mol_type = other RNA
  modified_base 1: mod_base = OTHER; note = 2'-deoxy-2'-fluorocytidine-3'-phosphate
  modified_base 2: mod_base = OTHER; note = 2'-O-methylcytidine-3'-phosphate
  modified_base 3: mod_base = OTHER; note = 2'-deoxy-2'-fluoroadenosine-3'-phosphate
  modified_base 4: mod_base = OTHER; note = 2'-O-methylcytidine-3'-phosphate
  modified_base 5: mod_base = OTHER; note = 2'-deoxy-2'-fluoroadenosine-3'-phosphate
  modified_base 6: mod_base = OTHER; note = 2'-O-methylguanosine-3'-phosphate
  modified_base 7: mod_base = OTHER; note = 2'-deoxy-2'-fluoroadenosine-3'-phosphate
  modified_base 8: mod_base = OTHER; note = 2'-O-methyladenosine-3'-phosphate
  modified_base 9: mod_base = OTHER; note = 2'-deoxy-2'-fluoroadenosine-3'-phosphate
  modified_base 10: mod_base = OTHER; note = 2'-deoxy-2'-fluorouridine-3'-phosphate
  modified_base 11: mod_base = OTHER; note = 2'-deoxy-2'-fluorouridine-3'-phosphate
  modified_base 12: mod_base = OTHER; note = 2'-O-methyluridine-3'-phosphate
  modified_base 13: mod_base = OTHER; note = 2'-deoxy-2'-fluorocytidine-3'-phosphate
  modified_base 14: mod_base = OTHER; note = 2'-O-methyluridine-3'-phosphate
  modified_base 15: mod_base = OTHER; note = 2'-deoxy-2'-fluorocytidine-3'-phosphate
  modified_base 16: mod_base = OTHER; note = 2'-O-methyluridine-3'-phosphate
  modified_base 17: mod_base = OTHER; note = 2'-deoxy-2'-fluoroadenosine-3'-phosphate
  modified_base 18: mod_base = OTHER; note = 2'-O-methyluridine-3'-phosphate
  modified_base 19: mod_base = OTHER; note = 2'-deoxy-2'-fluorocytidine-3'-phosphate
  modified_base 20: mod_base = OTHER; note = 2'-O-methyluridine-3'-phosphate
  modified_base 21: mod_base = OTHER; note = 2'-deoxy-2'-fluorouridine
ccacagaaatttctctatctt

SEQ ID NO: 925 - RNA, 21 nt, synthetic construct
  source 1..21: mol_type = other RNA
  modified_base 1: mod_base = OTHER; note = 2'-deoxy-2'-fluoroguanosine-3'-phosphate
  modified_base 2: mod_base = OTHER; note = 2'-O-methyluridine-3'-phosphate
  modified_base 3: mod_base = OTHER; note = 2'-deoxy-2'-fluorocytidine-3'-phosphate
  modified_base 4: mod_base = OTHER; note = 2'-O-methyladenosine-3'-phosphate
  modified_base 5: mod_base = OTHER; note = 2'-deoxy-2'-fluorocytidine-3'-phosphate
  modified_base 6: mod_base = OTHER; note = 2'-O-methyluridine-3'-phosphate
  modified_base 7: mod_base = OTHER; note = 2'-deoxy-2'-fluorouridine-3'-phosphate
  modified_base 8: mod_base = OTHER; note = 2'-O-methylguanosine-3'-phosphate
  modified_base 9: mod_base = OTHER; note = 2'-deoxy-2'-fluoroadenosine-3'-phosphate
  modified_base 10: mod_base = OTHER; note = 2'-deoxy-2'-fluoroadenosine-3'-phosphate
  modified_base 11: mod_base = OTHER; note = 2'-deoxy-2'-fluorocytidine-3'-phosphate
  modified_base 12: mod_base = OTHER; note = 2'-O-methyluridine-3'-phosphate
  modified_base 13: mod_base = OTHER; note = 2'-deoxy-2'-fluorocytidine-3'-phosphate
  modified_base 14: mod_base = OTHER; note = 2'-O-methyladenosine-3'-phosphate
  modified_base 15: mod_base = OTHER; note = 2'-deoxy-2'-fluoroadenosine-3'-phosphate
  modified_base 16: mod_base = OTHER; note = 2'-O-methylcytidine-3'-phosphate
  modified_base 17: mod_base = OTHER; note = 2'-deoxy-2'-fluorouridine-3'-phosphate
  modified_base 18: mod_base = OTHER; note = 2'-O-methylcytidine-3'-phosphate
  modified_base 19: mod_base = OTHER; note = 2'-deoxy-2'-fluoroadenosine-3'-phosphate
  modified_base 20: mod_base = OTHER; note = 2'-O-methyladenosine-3'-phosphate
  modified_base 21: mod_base = OTHER; note = 2'-deoxy-2'-fluoroadenosine
gtcacttgaactcaactcaaa

SEQ ID NO: 926 - RNA, 21 nt, synthetic construct
  source 1..21: mol_type = other RNA
  modified_base 1: mod_base = OTHER; note = 2'-deoxy-2'-fluorocytidine-3'-phosphate
  modified_base 2: mod_base = OTHER; note = 2'-O-methyluridine-3'-phosphate
  modified_base 3: mod_base = OTHER; note = 2'-deoxy-2'-fluorocytidine-3'-phosphate
  modified_base 4: mod_base = OTHER; note = 2'-O-methylcytidine-3'-phosphate
  modified_base 5: mod_base = OTHER; note = 2'-deoxy-2'-fluorouridine-3'-phosphate
  modified_base 6: mod_base = OTHER; note = 2'-O-methyladenosine-3'-phosphate
  modified_base 7: mod_base = OTHER; note = 2'-deoxy-2'-fluoroguanosine-3'-phosphate
  modified_base 8: mod_base = OTHER; note = 2'-O-methyladenosine-3'-phosphate
  modified_base 9: mod_base = OTHER; note = 2'-deoxy-2'-fluoroadenosine-3'-phosphate
  modified_base 10: mod_base = OTHER; note = 2'-deoxy-2'-fluoroguanosine-3'-phosphate
  modified_base 11: mod_base = OTHER; note = 2'-deoxy-2'-fluoroadenosine-3'-phosphate
  modified_base 12: mod_base = OTHER; note = 2'-O-methyladenosine-3'-phosphate
  modified_base 13: mod_base = OTHER; note = 2'-deoxy-2'-fluoroadenosine-3'-phosphate
  modified_base 14: mod_base = OTHER; note = 2'-O-methyladenosine-3'-phosphate
  modified_base 15: mod_base = OTHER; note = 2'-deoxy-2'-fluoroadenosine-3'-phosphate
  modified_base 16: mod_base = OTHER; note = 2'-O-methyladenosine-3'-phosphate
  modified_base 17: mod_base = OTHER; note = 2'-deoxy-2'-fluorouridine-3'-phosphate
  modified_base 18: mod_base = OTHER; note = 2'-O-methyluridine-3'-phosphate
  modified_base 19: mod_base = OTHER; note = 2'-deoxy-2'-fluorocytidine-3'-phosphate
  modified_base 20: mod_base = OTHER; note = 2'-O-methyluridine-3'-phosphate
  modified_base 21: mod_base = OTHER; note = 2'-deoxy-2'-fluoroadenosine
ctcctagaagaaaaaattcta

SEQ ID NO: 927 - RNA, 21 nt, synthetic construct
  source 1..21: mol_type = other RNA
  modified_base 1: mod_base = OTHER; note = 2'-deoxy-2'-fluoroadenosine-3'-phosphate
  modified_base 2: mod_base = OTHER; note = 2'-O-methyluridine-3'-phosphate
  modified_base 3: mod_base = OTHER; note = 2'-deoxy-2'-fluorouridine-3'-phosphate
  modified_base 4: mod_base = OTHER; note = 2'-O-methyluridine-3'-phosphate
  modified_base 5: mod_base = OTHER; note = 2'-deoxy-2'-fluoroadenosine-3'-phosphate
  modified_base 6: mod_base = OTHER; note = 2'-O-methylguanosine-3'-phosphate
  modified_base 7: mod_base = OTHER; note = 2'-deoxy-2'-fluoroadenosine-3'-phosphate
  modified_base 8: mod_base = OTHER; note = 2'-O-methyladenosine-3'-phosphate
  modified_base 9: mod_base = OTHER; note = 2'-deoxy-2'-fluoroguanosine-3'-phosphate
  modified_base 10: mod_base = OTHER; note = 2'-deoxy-2'-fluoroadenosine-3'-phosphate
  modified_base 11: mod_base = OTHER; note = 2'-deoxy-2'-fluoroguanosine-3'-phosphate
  modified_base 12: mod_base = OTHER; note = 2'-O-methylcytidine-3'-phosphate
  modified_base 13: mod_base = OTHER; note = 2'-deoxy-2'-fluoroadenosine-3'-phosphate
  modified_base 14: mod_base = OTHER; note = 2'-O-methyladenosine-3'-phosphate
  modified_base 15: mod_base = OTHER; note = 2'-deoxy-2'-fluorocytidine-3'-phosphate
  modified_base 16: mod_base = OTHER; note = 2'-O-methyluridine-3'-phosphate
  modified_base 17: mod_base = OTHER; note = 2'-deoxy-2'-fluoroadenosine-3'-phosphate
  modified_base 18: mod_base = OTHER; note = 2'-O-methyladenosine-3'-phosphate
  modified_base 19: mod_base = OTHER; note = 2'-deoxy-2'-fluorocytidine-3'-phosphate
  modified_base 20: mod_base = OTHER; note = 2'-O-methyluridine-3'-phosphate
  modified_base 21: mod_base = OTHER; note = 2'-deoxy-2'-fluoroadenosine
atttagaagagcaactaacta

SEQ ID NO: 928 - RNA, 21 nt, synthetic construct
  source 1..21: mol_type = other RNA
  modified_base 1: mod_base = OTHER; note = 2'-deoxy-2'-fluorocytidine-3'-phosphate
  modified_base 2: mod_base = OTHER; note = 2'-O-methyluridine-3'-phosphate
  modified_base 3: mod_base = OTHER; note = 2'-deoxy-2'-fluoroadenosine-3'-phosphate
  modified_base 4: mod_base = OTHER; note = 2'-O-methyladenosine-3'-phosphate
  modified_base 5: mod_base = OTHER; note = 2'-deoxy-2'-fluorocytidine-3'-phosphate
  modified_base 6: mod_base = OTHER; note = 2'-O-methyluridine-3'-phosphate
  modified_base 7: mod_base = OTHER; note = 2'-deoxy-2'-fluoroadenosine-3'-phosphate
  modified_base 8: mod_base = OTHER; note = 2'-O-methyladenosine-3'-phosphate
  modified_base 9: mod_base = OTHER; note = 2'-deoxy-2'-fluorocytidine-3'-phosphate
  modified_base 10: mod_base = OTHER; note = 2'-deoxy-2'-fluorouridine-3'-phosphate
  modified_base 11: mod_base = OTHER; note = 2'-deoxy-2'-fluorouridine-3'-phosphate
  modified_base 12: mod_base = OTHER; note = 2'-O-methyladenosine-3'-phosphate
  modified_base 13: mod_base = OTHER; note = 2'-deoxy-2'-fluoroadenosine-3'-phosphate
  modified_base 14: mod_base = OTHER; note = 2'-O-methyluridine-3'-phosphate
  modified_base 15: mod_base = OTHER; note = 2'-deoxy-2'-fluorouridine-3'-phosphate
  modified_base 16: mod_base = OTHER; note = 2'-O-methylcytidine-3'-phosphate
  modified_base 17: mod_base = OTHER; note = 2'-deoxy-2'-fluoroadenosine-3'-phosphate
  modified_base 18: mod_base = OTHER; note = 2'-O-methyladenosine-3'-phosphate
  modified_base 19: mod_base = OTHER; note = 2'-deoxy-2'-fluoroadenosine-3'-phosphate
  modified_base 20: mod_base = OTHER; note = 2'-O-methyladenosine-3'-phosphate
  modified_base 21: mod_base = OTHER; note = 2'-deoxy-2'-fluorouridine
ctaactaacttaattcaaaat

SEQ ID NO: 929 - RNA, 21 nt, synthetic construct
  source 1..21: mol_type = other RNA
  modified_base 1: mod_base = OTHER; note = 2'-deoxy-2'-fluorocytidine-3'-phosphate
  modified_base 2: mod_base = OTHER; note = 2'-O-methyladenosine-3'-phosphate
  modified_base 3: mod_base = OTHER; note = 2'-deoxy-2'-fluoroguanosine-3'-phosphate
  modified_base 4: mod_base = OTHER; note = 2'-O-methylcytidine-3'-phosphate
  modified_base 5: mod_base = OTHER; note = 2'-deoxy-2'-fluoroadenosine-3'-phosphate
  modified_base 6: mod_base = OTHER; note = 2'-O-methyluridine-3'-phosphate
  modified_base 7: mod_base = OTHER; note = 2'-deoxy-2'-fluoroadenosine-3'-phosphate
  modified_base 8: mod_base = OTHER; note = 2'-O-methylguanosine-3'-phosphate
  modified_base 9: mod_base = OTHER; note = 2'-deoxy-2'-fluorouridine-3'-phosphate
  modified_base 10: mod_base = OTHER; note = 2'-deoxy-2'-fluorocytidine-3'-phosphate
  modified_base 11: mod_base = OTHER; note = 2'-deoxy-2'-fluoroadenosine-3'-phosphate
  modified_base 12: mod_base = OTHER; note = 2'-O-methyladenosine-3'-phosphate
  modified_base 13: mod_base = OTHER; note = 2'-deoxy-2'-fluoroadenosine-3'-phosphate
  modified_base 14: mod_base = OTHER; note = 2'-O-methyluridine-3'-phosphate
  modified_base 15: mod_base = OTHER; note = 2'-deoxy-2'-fluoroadenosine-3'-phosphate
  modified_base 16: mod_base = OTHER; note = 2'-O-methyladenosine-3'-phosphate
  modified_base 17: mod_base = OTHER; note = 2'-deoxy-2'-fluoroadenosine-3'-phosphate
  modified_base 18: mod_base = OTHER; note = 2'-O-methyladenosine-3'-phosphate
  modified_base 19: mod_base = OTHER; note = 2'-deoxy-2'-fluoroguanosine-3'-phosphate
  modified_base 20: mod_base = OTHER; note = 2'-O-methyladenosine-3'-phosphate
  modified_base 21: mod_base = OTHER; note = 2'-deoxy-2'-fluoroadenosine
cagcatagtcaaataaaagaa

SEQ ID NO: 930 - RNA, 21 nt, synthetic construct
  source 1..21: mol_type = other RNA
  modified_base 1: mod_base = OTHER; note = 2'-deoxy-2'-fluoroguanosine-3'-phosphate
  modified_base 2: mod_base = OTHER; note = 2'-O-methyladenosine-3'-phosphate
  modified_base 3: mod_base = OTHER; note = 2'-deoxy-2'-fluoroadenosine-3'-phosphate
  modified_base 4: mod_base = OTHER; note = 2'-O-methyladenosine-3'-phosphate
  modified_base 5: mod_base = OTHER; note = 2'-deoxy-2'-fluorouridine-3'-phosphate
  modified_base 6: mod_base = OTHER; note = 2'-O-methyladenosine-3'-phosphate
  modified_base 7: mod_base = OTHER; note = 2'-deoxy-2'-fluoroadenosine-3'-phosphate
  modified_base 8: mod_base = OTHER; note = 2'-O-methylguanosine-3'-phosphate
  modified_base 9: mod_base = OTHER; note = 2'-deoxy-2'-fluoroadenosine-3'-phosphate
  modified_base 10: mod_base = OTHER; note = 2'-deoxy-2'-fluoroadenosine-3'-phosphate
  modified_base 11: mod_base = OTHER; note = 2'-deoxy-2'-fluoroadenosine-3'-phosphate
  modified_base 12: mod_base = OTHER; note = 2'-O-methyluridine-3'-phosphate
  modified_base 13: mod_base = OTHER; note = 2'-deoxy-2'-fluoroguanosine-3'-phosphate
  modified_base 14: mod_base = OTHER; note = 2'-O-methyluridine-3'-phosphate
  modified_base 15: mod_base = OTHER; note = 2'-deoxy-2'-fluoroadenosine-3'-phosphate
  modified_base 16: mod_base = OTHER; note = 2'-O-methyladenosine-3'-phosphate
  modified_base 17: mod_base = OTHER; note = 2'-deoxy-2'-fluoroadenosine-3'-phosphate
  modified_base 18: mod_base = OTHER; note = 2'-O-methyladenosine-3'-phosphate
  modified_base 19: mod_base = OTHER; note = 2'-deoxy-2'-fluorocytidine-3'-phosphate
  modified_base 20: mod_base = OTHER; note = 2'-O-methyladenosine-3'-phosphate
  modified_base 21: mod_base = OTHER; note = 2'-deoxy-2'-fluorouridine
gaaataagaaatgtaaaacat

SEQ ID NO: 931 - RNA, 21 nt, synthetic construct
  source 1..21: mol_type = other RNA
  modified_base 1: mod_base = OTHER; note = 2'-deoxy-2'-fluorouridine-3'-phosphate
  modified_base 2: mod_base = OTHER; note = 2'-O-methylcytidine-3'-phosphate
  modified_base 3: mod_base = OTHER; note = 2'-deoxy-2'-fluoroadenosine-3'-phosphate
  modified_base 4: mod_base = OTHER; note = 2'-O-methylcytidine-3'-phosphate
  modified_base 5: mod_base = OTHER; note = 2'-deoxy-2'-fluorouridine-3'-phosphate
  modified_base 6: mod_base = OTHER; note = 2'-O-methyluridine-3'-phosphate
  modified_base 7: mod_base = OTHER; note = 2'-deoxy-2'-fluoroguanosine-3'-phosphate
  modified_base 8: mod_base = OTHER; note = 2'-O-methyladenosine-3'-phosphate
  modified_base 9: mod_base = OTHER; note = 2'-deoxy-2'-fluoroadenosine-3'-phosphate
  modified_base 10: mod_base = OTHER; note = 2'-deoxy-2'-fluorocytidine-3'-phosphate
  modified_base 11: mod_base = OTHER; note = 2'-deoxy-2'-fluorouridine-3'-phosphate
  modified_base 12: mod_base = OTHER; note = 2'-O-methylcytidine-3'-phosphate
  modified_base 13: mod_base = OTHER; note = 2'-deoxy-2'-fluoroadenosine-3'-phosphate
  modified_base 14: mod_base = OTHER; note = 2'-O-methyladenosine-3'-phosphate
  modified_base 15: mod_base = OTHER; note = 2'-deoxy-2'-fluorocytidine-3'-phosphate
  modified_base 16: mod_base = OTHER; note = 2'-O-methyluridine-3'-phosphate
  modified_base 17: mod_base = OTHER; note = 2'-deoxy-2'-fluorocytidine-3'-phosphate
  modified_base 18: mod_base = OTHER; note = 2'-O-methyladenosine-3'-phosphate
  modified_base 19: mod_base = OTHER; note = 2'-deoxy-2'-fluoroadenosine-3'-phosphate
  modified_base 20: mod_base = OTHER; note = 2'-O-methyladenosine-3'-phosphate
  modified_base 21: mod_base = OTHER; note = 2'-deoxy-2'-fluoroadenosine
tcacttgaactcaactcaaaa

SEQ ID NO: 932 - RNA, 21 nt, synthetic construct
  source 1..21: mol_type = other RNA
  modified_base 1: mod_base = OTHER; note = 2'-deoxy-2'-fluorouridine-3'-phosphate
  modified_base 2: mod_base = OTHER; note = 2'-O-methylcytidine-3'-phosphate
  modified_base 3: mod_base = OTHER; note = 2'-deoxy-2'-fluorouridine-3'-phosphate
  modified_base 4: mod_base = OTHER; note = 2'-O-methyladenosine-3'-phosphate
  modified_base 5: mod_base = OTHER; note = 2'-deoxy-2'-fluorocytidine-3'-phosphate
  modified_base 6: mod_base = OTHER; note = 2'-O-methyluridine-3'-phosphate
  modified_base 7: mod_base = OTHER; note = 2'-deoxy-2'-fluorouridine-3'-phosphate
  modified_base 8: mod_base = OTHER; note = 2'-O-methylcytidine-3'-phosphate
  modified_base 9: mod_base = OTHER; note = 2'-deoxy-2'-fluoroadenosine-3'-phosphate
  modified_base 10: mod_base = OTHER; note = 2'-deoxy-2'-fluoroadenosine-3'-phosphate
  modified_base 11: mod_base = OTHER; note = 2'-deoxy-2'-fluorocytidine-3'-phosphate
  modified_base 12: mod_base = OTHER; note = 2'-O-methyladenosine-3'-phosphate
  modified_base 13: mod_base = OTHER; note = 2'-deoxy-2'-fluoroadenosine-3'-phosphate
  modified_base 14: mod_base = OTHER; note = 2'-O-methyladenosine-3'-phosphate
  modified_base 15: mod_base = OTHER; note = 2'-deoxy-2'-fluoroadenosine-3'-phosphate
  modified_base 16: mod_base = OTHER; note = 2'-O-methyladenosine-3'-phosphate
  modified_base 17: mod_base = OTHER; note = 2'-deoxy-2'-fluoroguanosine-3'-phosphate
  modified_base 18: mod_base = OTHER; note = 2'-O-methyluridine-3'-phosphate
  modified_base 19: mod_base = OTHER; note = 2'-deoxy-2'-fluoroguanosine-3'-phosphate
  modified_base 20: mod_base = OTHER; note = 2'-O-methyladenosine-3'-phosphate
  modified_base 21: mod_base = OTHER; note = 2'-deoxy-2'-fluoroadenosine
tctacttcaacaaaaagtgaa

SEQ ID NO: 933 - RNA, 21 nt, synthetic construct
  source 1..21: mol_type = other RNA
  modified_base 1: mod_base = OTHER; note = 2'-deoxy-2'-fluorouridine-3'-phosphate
  modified_base 2: mod_base = OTHER; note = 2'-O-methyluridine-3'-phosphate
  modified_base 3: mod_base = OTHER; note = 2'-deoxy-2'-fluorouridine-3'-phosphate
  modified_base 4: mod_base = OTHER; note = 2'-O-methyladenosine-3'-phosphate
  modified_base 5: mod_base = OTHER; note = 2'-deoxy-2'-fluoroguanosine-3'-phosphate
  modified_base 6: mod_base = OTHER; note = 2'-O-methyladenosine-3'-phosphate
  modified_base 7: mod_base = OTHER; note = 2'-deoxy-2'-fluoroadenosine-3'-phosphate
  modified_base 8: mod_base = OTHER; note = 2'-O-methylguanosine-3'-phosphate
  modified_base 9: mod_base = OTHER; note = 2'-deoxy-2'-fluoroadenosine-3'-phosphate
  modified_base 10: mod_base = OTHER; note = 2'-deoxy-2'-fluoroguanosine-3'-phosphate
  modified_base 11: mod_base = OTHER; note = 2'-deoxy-2'-fluorocytidine-3'-phosphate
  modified_base 12: mod_base = OTHER; note = 2'-O-methyladenosine-3'-phosphate
  modified_base 13: mod_base = OTHER; note = 2'-deoxy-2'-fluoroadenosine-3'-phosphate
  modified_base 14: mod_base = OTHER; note = 2'-O-methylcytidine-3'-phosphate
  modified_base 15: mod_base = OTHER; note = 2'-deoxy-2'-fluorouridine-3'-phosphate
  modified_base 16: mod_base = OTHER; note = 2'-O-methyladenosine-3'-phosphate
  modified_base 17: mod_base = OTHER; note = 2'-deoxy-2'-fluoroadenosine-3'-phosphate
  modified_base 18: mod_base = OTHER; note = 2'-O-methylcytidine-3'-phosphate
  modified_base 19: mod_base = OTHER; note = 2'-deoxy-2'-fluorouridine-3'-phosphate
  modified_base 20: mod_base = OTHER; note = 2'-O-methyladenosine-3'-phosphate
  modified_base 21: mod_base = OTHER; note = 2'-deoxy-2'-fluoroadenosine
tttagaagagcaactaactaa

SEQ ID NO: 934 - RNA, 21 nt, synthetic construct
  source 1..21: mol_type = other RNA
  modified_base 1: mod_base = OTHER; note = 2'-deoxy-2'-fluoroadenosine-3'-phosphate
  modified_base 2: mod_base = OTHER; note = 2'-O-methyladenosine-3'-phosphate
  modified_base 3: mod_base = OTHER; note = 2'-deoxy-2'-fluoroadenosine-3'-phosphate
  modified_base 4: mod_base = OTHER; note = 2'-O-methyladenosine-3'-phosphate
  modified_base 5: mod_base = OTHER; note = 2'-deoxy-2'-fluorocytidine-3'-phosphate
  modified_base 6: mod_base = OTHER; note = 2'-O-methyladenosine-3'-phosphate
  modified_base 7: mod_base = OTHER; note = 2'-deoxy-2'-fluoroadenosine-3'-phosphate
  modified_base 8: mod_base = OTHER; note = 2'-O-methylguanosine-3'-phosphate
  modified_base 9: mod_base = OTHER; note = 2'-deoxy-2'-fluoroadenosine-3'-phosphate
  modified_base 10: mod_base = OTHER; note = 2'-deoxy-2'-fluorouridine-3'-phosphate
  modified_base 11: mod_base = OTHER; note = 2'-deoxy-2'-fluoroadenosine-3'-phosphate
  modified_base 12: mod_base = OTHER; note = 2'-O-methyladenosine-3'-phosphate
  modified_base 13: mod_base = OTHER; note = 2'-deoxy-2'-fluorouridine-3'-phosphate
  modified_base 14: mod_base = OTHER; note = 2'-O-methyladenosine-3'-phosphate
  modified_base 15: mod_base = OTHER; note = 2'-deoxy-2'-fluoroguanosine-3'-phosphate
  modified_base 16: mod_base = OTHER; note = 2'-O-methylcytidine-3'-phosphate
  modified_base 17: mod_base = OTHER; note = 2'-deoxy-2'-fluoroadenosine-3'-phosphate
  modified_base 18: mod_base = OTHER; note = 2'-O-methyluridine-3'-phosphate
  modified_base 19: mod_base = OTHER; note = 2'-deoxy-2'-fluorocytidine-3'-phosphate
  modified_base 20: mod_base = OTHER; note = 2'-O-methyladenosine-3'-phosphate
  modified_base 21: mod_base = OTHER; note = 2'-deoxy-2'-fluoroadenosine
aaaacaagataatagcatcaa

SEQ ID NO: 935 - RNA, 21 nt, synthetic construct
  source 1..21: mol_type = other RNA
  modified_base 1: mod_base = OTHER; note = 2'-deoxy-2'-fluoroadenosine-3'-phosphate
  modified_base 2: mod_base = OTHER; note = 2'-O-methylguanosine-3'-phosphate
  modified_base 3: mod_base = OTHER; note = 2'-deoxy-2'-fluorocytidine-3'-phosphate
  modified_base 4: mod_base = OTHER; note = 2'-O-methyladenosine-3'-phosphate
  modified_base 5: mod_base = OTHER; note = 2'-deoxy-2'-fluorouridine-3'-phosphate
  modified_base 6: mod_base = OTHER; note = 2'-O-methyladenosine-3'-phosphate
  modified_base 7: mod_base = OTHER; note = 2'-deoxy-2'-fluoroguanosine-3'-phosphate
  modified_base 8: mod_base = OTHER; note = 2'-O-methyluridine-3'-phosphate
  modified_base 9: mod_base = OTHER; note = 2'-deoxy-2'-fluorocytidine-3'-phosphate
  modified_base 10: mod_base = OTHER; note = 2'-deoxy-2'-fluoroadenosine-3'-phosphate
  modified_base 11: mod_base = OTHER; note = 2'-deoxy-2'-fluoroadenosine-3'-phosphate
  modified_base 12: mod_base = OTHER; note = 2'-O-methyladenosine-3'-phosphate
  modified_base 13: mod_base = OTHER; note = 2'-deoxy-2'-fluorouridine-3'-phosphate
  modified_base 14: mod_base = OTHER; note = 2'-O-methyladenosine-3'-phosphate
  modified_base 15: mod_base = OTHER; note = 2'-deoxy-2'-fluoroadenosine-3'-phosphate
  modified_base 16: mod_base = OTHER; note = 2'-O-methyladenosine-3'-phosphate
  modified_base 17: mod_base = OTHER; note = 2'-deoxy-2'-fluoroadenosine-3'-phosphate
  modified_base 18: mod_base = OTHER; note = 2'-O-methylguanosine-3'-phosphate
  modified_base 19: mod_base = OTHER; note = 2'-deoxy-2'-fluoroadenosine-3'-phosphate
  modified_base 20: mod_base = OTHER; note = 2'-O-methyladenosine-3'-phosphate
  modified_base 21: mod_base = OTHER; note = 2'-deoxy-2'-fluoroadenosine
agcatagtcaaataaaagaaa

SEQ ID NO: 936 - RNA, 21 nt, synthetic construct
  source 1..21: mol_type = other RNA
  modified_base 1: mod_base = OTHER; note = 2'-deoxy-2'-fluoroadenosine-3'-phosphate
  modified_base 2: mod_base = OTHER; note = 2'-O-methylguanosine-3'-phosphate
  modified_base 3: mod_base = OTHER; note = 2'-deoxy-2'-fluoroadenosine-3'-phosphate
  modified_base 4: mod_base = OTHER; note = 2'-O-methylcytidine-3'-phosphate
  modified_base 5: mod_base = OTHER; note = 2'-deoxy-2'-fluorocytidine-3'-phosphate
  modified_base 6: mod_base = OTHER; note = 2'-O-methylcytidine-3'-phosphate
  modified_base 7: mod_base = OTHER; note = 2'-deoxy-2'-fluoroadenosine-3'-phosphate
  modified_base 8: mod_base = OTHER; note = 2'-O-methylguanosine-3'-phosphate
  modified_base 9: mod_base = OTHER; note = 2'-deoxy-2'-fluorocytidine-3'-phosphate
  modified_base 10: mod_base = OTHER; note = 2'-deoxy-2'-fluoroadenosine-3'-phosphate
  modified_base 11: mod_base = OTHER; note = 2'-deoxy-2'-fluoroadenosine-3'-phosphate
  modified_base 12: mod_base = OTHER; note = 2'-O-methylcytidine-3'-phosphate
  modified_base 13: mod_base = OTHER; note = 2'-deoxy-2'-fluorouridine-3'-phosphate
  modified_base 14: mod_base = OTHER; note = 2'-O-methylcytidine-3'-phosphate
  modified_base 15: mod_base = OTHER; note = 2'-deoxy-2'-fluorouridine-3'-phosphate
  modified_base 16: mod_base = OTHER; note = 2'-O-methylcytidine-3'-phosphate
  modified_base 17: mod_base = OTHER; note = 2'-deoxy-2'-fluoroadenosine-3'-phosphate
  modified_base 18: mod_base = OTHER; note = 2'-O-methyladenosine-3'-phosphate
  modified_base 19: mod_base = OTHER; note = 2'-deoxy-2'-fluoroguanosine-3'-phosphate
  modified_base 20: mod_base = OTHER; note = 2'-O-methyluridine-3'-phosphate
  modified_base 21: mod_base = OTHER; note = 2'-deoxy-2'-fluorouridine
agacccagcaactctcaagtt

SEQ ID NO: 937 - RNA, 21 nt, synthetic construct
  source 1..21: mol_type = other RNA
  modified_base 1: mod_base = OTHER; note = 2'-deoxy-2'-fluoroadenosine-3'-phosphate
  modified_base 2: mod_base = OTHER; note = 2'-O-methylguanosine-3'-phosphate
  modified_base 3: mod_base = OTHER; note = 2'-deoxy-2'-fluorouridine-3'-phosphate
  modified_base 4: mod_base = OTHER; note = 2'-O-methylcytidine-3'-phosphate
  modified_base 5: mod_base = OTHER; note = 2'-deoxy-2'-fluorocytidine-3'-phosphate
  modified_base 6: mod_base = OTHER; note = 2'-O-methyladenosine-3'-phosphate
  modified_base 7: mod_base = OTHER; note = 2'-deoxy-2'-fluorouridine-3'-phosphate
  modified_base 8: mod_base = OTHER; note = 2'-O-methylguanosine-3'-phosphate
  modified_base 9: mod_base = OTHER; note = 2'-deoxy-2'-fluoroguanosine-3'-phosphate
  modified_base 10: mod_base = OTHER; note = 2'-deoxy-2'-fluoroadenosine-3'-phosphate
  modified_base 11: mod_base = OTHER; note = 2'-deoxy-2'-fluorocytidine-3'-phosphate
  modified_base 12: mod_base = OTHER; note = 2'-O-methyladenosine-3'-phosphate
  modified_base 13: mod_base = OTHER; note = 2'-deoxy-2'-fluorouridine-3'-phosphate
  modified_base 14: mod_base = OTHER; note = 2'-O-methyluridine-3'-phosphate
  modified_base 15: mod_base = OTHER; note = 2'-deoxy-2'-fluoroadenosine-3'-phosphate
  modified_base 16: mod_base = OTHER; note = 2'-O-methyladenosine-3'-phosphate
  modified_base 17: mod_base = OTHER; note = 2'-deoxy-2'-fluorouridine-3'-phosphate
  modified_base 18: mod_base = OTHER; note = 2'-O-methyluridine-3'-phosphate
  modified_base 19: mod_base = OTHER; note = 2'-deoxy-2'-fluorocytidine-3'-phosphate
  modified_base 20: mod_base = OTHER; note = 2'-O-methyladenosine-3'-phosphate
  modified_base 21: mod_base = OTHER; note = 2'-deoxy-2'-fluoroadenosine
agtccatggacattaattcaa

SEQ ID NO: 938 - RNA, 21 nt, synthetic construct
  source 1..21: mol_type = other RNA
  modified_base 1: mod_base = OTHER; note = 2'-deoxy-2'-fluoroguanosine-3'-phosphate
  modified_base 2: mod_base = OTHER; note = 2'-O-methyladenosine-3'-phosphate
  modified_base 3: mod_base = OTHER; note = 2'-deoxy-2'-fluorouridine-3'-phosphate
  modified_base 4: mod_base = OTHER; note = 2'-O-methylguanosine-3'-phosphate
  modified_base 5: mod_base = OTHER; note = 2'-deoxy-2'-fluoroguanosine-3'-phosphate
  modified_base 6: mod_base = OTHER; note = 2'-O-methyladenosine-3'-phosphate
  modified_base 7: mod_base = OTHER; note = 2'-deoxy-2'-fluorouridine-3'-phosphate
  modified_base 8: mod_base = OTHER; note = 2'-O-methylcytidine-3'-phosphate
  modified_base 9: mod_base = OTHER; note = 2'-deoxy-2'-fluoroadenosine-3'-phosphate
  modified_base 10: mod_base = OTHER; note = 2'-deoxy-2'-fluorocytidine-3'-phosphate
  modified_base 11: mod_base = OTHER; note = 2'-deoxy-2'-fluoroadenosine-3'-phosphate
  modified_base 12: mod_base = OTHER; note = 2'-O-methyladenosine-3'-phosphate
  modified_base 13: mod_base = OTHER; note = 2'-deoxy-2'-fluoroadenosine-3'-phosphate
  modified_base 14: mod_base = OTHER; note = 2'-O-methyladenosine-3'-phosphate
  modified_base 15: mod_base = OTHER; note = 2'-deoxy-2'-fluorocytidine-3'-phosphate
  modified_base 16: mod_base = OTHER; note = 2'-O-methyluridine-3'-phosphate
  modified_base 17: mod_base = OTHER; note = 2'-deoxy-2'-fluorouridine-3'-phosphate
  modified_base 18: mod_base = OTHER; note = 2'-O-methylcytidine-3'-phosphate
  modified_base 19: mod_base = OTHER; note = 2'-deoxy-2'-fluoroadenosine-3'-phosphate
  modified_base 20: mod_base = OTHER; note = 2'-O-methyladenosine-3'-phosphate
  modified_base 21: mod_base = OTHER; note = 2'-deoxy-2'-fluorouridine
gatggatcacaaaacttcaat

SEQ ID NO: 939 - RNA, 21 nt, synthetic construct
  source 1..21: mol_type = other RNA
  modified_base 1: mod_base = OTHER; note = 2'-deoxy-2'-fluorocytidine-3'-phosphate
  modified_base 2: mod_base = OTHER; note = 2'-O-methyluridine-3'-phosphate
  modified_base 3: mod_base = OTHER; note = 2'-deoxy-2'-fluoroadenosine-3'-phosphate
  modified_base 4: mod_base = OTHER; note = 2'-O-methylguanosine-3'-phosphate
  modified_base 5: mod_base = OTHER; note = 2'-deoxy-2'-fluoroadenosine-3'-phosphate
  modified_base 6: mod_base = OTHER; note = 2'-O-methylguanosine-3'-phosphate
  modified_base 7: mod_base = OTHER; note = 2'-deoxy-2'-fluoroadenosine-3'-phosphate
  modified_base 8: mod_base = OTHER; note = 2'-O-methyladenosine-3'-phosphate
  modified_base 9: mod_base = OTHER; note = 2'-deoxy-2'-fluoroguanosine-3'-phosphate
  modified_base 10: mod_base = OTHER; note = 2'-deoxy-2'-fluoroadenosine-3'-phosphate
  modified_base 11: mod_base = OTHER; note = 2'-deoxy-2'-fluorouridine-3'-phosphate
  modified_base 12: mod_base = OTHER; note = 2'-O-methyladenosine-3'-phosphate
  modified_base 13: mod_base = OTHER; note = 2'-deoxy-2'-fluorouridine-3'-phosphate
  modified_base 14: mod_base = OTHER; note = 2'-O-methyladenosine-3'-phosphate
  modified_base 15: mod_base = OTHER; note = 2'-deoxy-2'-fluorocytidine-3'-phosphate
  modified_base 16: mod_base = OTHER; note = 2'-O-methyluridine-3'-phosphate
  modified_base 17: mod_base = OTHER; note = 2'-deoxy-2'-fluorocytidine-3'-phosphate
  modified_base 18: mod_base = OTHER; note = 2'-O-methylcytidine-3'-phosphate
  modified_base 19: mod_base = OTHER; note = 2'-deoxy-2'-fluoroadenosine-3'-phosphate
  modified_base 20: mod_base = OTHER; note = 2'-O-methyluridine-3'-phosphate
  modified_base 21: mod_base = OTHER; note = 2'-deoxy-2'-fluoroadenosine
ctagagaagatatactccata

SEQ ID NO: 940 - RNA, 21 nt, synthetic construct
  source 1..21: mol_type = other RNA
  modified_base 1: mod_base = OTHER; note = 2'-deoxy-2'-fluoroadenosine-3'-phosphate
  modified_base 2: mod_base = OTHER; note = 2'-O-methyladenosine-3'-phosphate
  modified_base 3: mod_base = OTHER; note = 2'-deoxy-2'-fluoroadenosine-3'-phosphate
  modified_base 4: mod_base = OTHER; note = 2'-O-methylguanosine-3'-phosphate
  modified_base 5: mod_base = OTHER; note = 2'-deoxy-2'-fluoroadenosine-3'-phosphate
  modified_base 6: mod_base = OTHER; note = 2'-O-methylcytidine-3'-phosphate
  modified_base 7: mod_base = OTHER; note = 2'-deoxy-2'-fluoroadenosine-3'-phosphate
  modified_base 8: mod_base = OTHER; note = 2'-O-methyladenosine-3'-phosphate
  modified_base 9: mod_base = OTHER; note = 2'-deoxy-2'-fluorocytidine-3'-phosphate
  modified_base 10: mod_base = OTHER; note = 2'-deoxy-2'-fluoroadenosine-3'-phosphate
  modified_base 11: mod_base = OTHER; note = 2'-deoxy-2'-fluoroadenosine-3'-phosphate
  modified_base 12: mod_base = OTHER; note = 2'-O-methyladenosine-3'-phosphate
  modified_base 13: mod_base = OTHER; note = 2'-deoxy-2'-fluorocytidine-3'-phosphate
  modified_base 14: mod_base = OTHER; note = 2'-O-methyladenosine-3'-phosphate
  modified_base 15: mod_base = OTHER; note = 2'-deoxy-2'-fluorouridine-3'-phosphate
  modified_base 16: mod_base = OTHER; note = 2'-O-methyluridine-3'-phosphate
  modified_base 17: mod_base = OTHER; note = 2'-deoxy-2'-fluoroadenosine-3'-phosphate
  modified_base 18: mod_base = OTHER; note = 2'-O-methyluridine-3'-phosphate
  modified_base 19: mod_base = OTHER; note = 2'-deoxy-2'-fluoroadenosine-3'-phosphate
  modified_base 20: mod_base = OTHER; note = 2'-O-methyluridine-3'-phosphate
  modified_base 21: mod_base = OTHER; note = 2'-deoxy-2'-fluorouridine
aaagacaacaaacattatatt

SEQ ID NO: 941 - RNA, 21 nt, synthetic construct
  source 1..21: mol_type = other RNA
  modified_base 1: mod_base = OTHER; note = 2'-deoxy-2'-fluorocytidine-3'-phosphate
  modified_base 2: mod_base = OTHER; note = 2'-O-methyladenosine-3'-phosphate
  modified_base 3: mod_base = OTHER; note = 2'-deoxy-2'-fluorouridine-3'-phosphate
  modified_base 4: mod_base = OTHER; note = 2'-O-methyluridine-3'-phosphate
  modified_base 5: mod_base = OTHER; note = 2'-deoxy-2'-fluoroadenosine-3'-phosphate
  modified_base 6: mod_base = OTHER; note = 2'-O-methyluridine-3'-phosphate
  modified_base 7: mod_base = OTHER; note = 2'-deoxy-2'-fluoroadenosine-3'-phosphate
  modified_base 8: mod_base = OTHER; note = 2'-O-methyluridine-3'-phosphate
  modified_base 9: mod_base = OTHER; note = 2'-deoxy-2'-fluorouridine-3'-phosphate
  modified_base 10: mod_base = OTHER; note = 2'-deoxy-2'-fluoroguanosine-3'-phosphate
  modified_base 11: mod_base = OTHER; note = 2'-deoxy-2'-fluoroadenosine-3'-phosphate
  modified_base 12: mod_base = OTHER; note = 2'-O-methyladenosine-3'-phosphate
  modified_base 13: mod_base = OTHER; note = 2'-deoxy-2'-fluorouridine-3'-phosphate
  modified_base 14: mod_base = OTHER; note = 2'-O-methyladenosine-3'-phosphate
  modified_base 15: mod_base = OTHER; note = 2'-deoxy-2'-fluorouridine-3'-phosphate
  modified_base 16: mod_base = OTHER; note = 2'-O-methyluridine-3'-phosphate
  modified_base 17: mod_base = OTHER; note = 2'-deoxy-2'-fluorocytidine-3'-phosphate
  modified_base 18: mod_base = OTHER; note = 2'-O-methyluridine-3'-phosphate
  modified_base 19: mod_base = OTHER; note = 2'-deoxy-2'-fluorouridine-3'-phosphate
  modified_base 20: mod_base = OTHER; note = 2'-O-methyluridine-3'-phosphate
  modified_base 21: mod_base = OTHER; note = 2'-deoxy-2'-fluorouridine
cattatattgaatattctttt

SEQ ID NO: 942 - RNA, 21 nt, synthetic construct
  source 1..21: mol_type = other RNA
  modified_base 1: mod_base = OTHER; note = 2'-deoxy-2'-fluoroguanosine-3'-phosphate
  modified_base 2: mod_base = OTHER; note = 2'-O-methyladenosine-3'-phosphate
  modified_base 3: mod_base = OTHER; note = 2'-deoxy-2'-fluorocytidine-3'-phosphate
  modified_base 4: mod_base = OTHER; note = 2'-O-methylcytidine-3'-phosphate
  modified_base 5: mod_base = OTHER; note = 2'-deoxy-2'-fluorocytidine-3'-phosphate
  modified_base 6: mod_base = OTHER; note = 2'-O-methyladenosine-3'-phosphate
  modified_base 7: mod_base = OTHER; note = 2'-deoxy-2'-fluoroguanosine-3'-phosphate
  modified_base 8: mod_base = OTHER; note = 2'-O-methylcytidine-3'-phosphate
  modified_base 9: mod_base = OTHER; note = 2'-deoxy-2'-fluoroadenosine-3'-phosphate
  modified_base 10: mod_base = OTHER; note = 2'-deoxy-2'-fluoroadenosine-3'-phosphate
  modified_base 11: mod_base = OTHER; note = 2'-deoxy-2'-fluorocytidine-3'-phosphate
  modified_base 12: mod_base = OTHER; note = 2'-O-methyluridine-3'-phosphate
  modified_base 13: mod_base = OTHER; note = 2'-deoxy-2'-fluorocytidine-3'-phosphate
  modified_base 14: mod_base = OTHER; note = 2'-O-methyluridine-3'-phosphate
  modified_base 15: mod_base = OTHER; note = 2'-deoxy-2'-fluorocytidine-3'-phosphate
  modified_base 16: mod_base = OTHER; note = 2'-O-methyladenosine-3'-phosphate
  modified_base 17: mod_base = OTHER; note = 2'-deoxy-2'-fluoroadenosine-3'-phosphate
  modified_base 18: mod_base = OTHER; note = 2'-O-methylguanosine-3'-phosphate
  modified_base 19: mod_base = OTHER; note = 2'-deoxy-2'-fluorouridine-3'-phosphate
  modified_base 20: mod_base = OTHER; note = 2'-O-methyluridine-3'-phosphate
  modified_base 21: mod_base = OTHER; note = 2'-deoxy-2'-fluorouridine
gacccagcaactctcaagttt

SEQ ID NO: 943 - RNA, 21 nt, synthetic construct
  source 1..21: mol_type = other RNA
  modified_base 1: mod_base = OTHER; note = 2'-deoxy-2'-fluoroguanosine-3'-phosphate
  modified_base 2: mod_base = OTHER; note = 2'-O-methylguanosine-3'-phosphate
  modified_base 3: mod_base = OTHER; note = 2'-deoxy-2'-fluoroadenosine-3'-phosphate
  modified_base 4: mod_base = OTHER; note = 2'-O-methyluridine-3'-phosphate
  modified_base 5: mod_base = OTHER; note = 2'-deoxy-2'-fluorocytidine-3'-phosphate
  modified_base 6: mod_base = OTHER; note = 2'-O-methyladenosine-3'-phosphate
  modified_base 7: mod_base = OTHER; note = 2'-deoxy-2'-fluorocytidine-3'-phosphate
  modified_base 8: mod_base = OTHER; note = 2'-O-methyladenosine-3'-phosphate
  modified_base 9: mod_base = OTHER; note = 2'-deoxy-2'-fluoroadenosine-3'-phosphate
  modified_base 10: mod_base = OTHER; note = 2'-deoxy-2'-fluoroadenosine-3'-phosphate
  modified_base 11: mod_base = OTHER; note = 2'-deoxy-2'-fluoroadenosine-3'-phosphate
  modified_base 12: mod_base = OTHER; note = 2'-O-methylcytidine-3'-phosphate
  modified_base 13: mod_base = OTHER; note = 2'-deoxy-2'-fluorouridine-3'-phosphate
  modified_base 14: mod_base = OTHER; note = 2'-O-methyluridine-3'-phosphate
  modified_base 15: mod_base = OTHER; note = 2'-deoxy-2'-fluorocytidine-3'-phosphate
  modified_base 16: mod_base = OTHER; note = 2'-O-methyladenosine-3'-phosphate
  modified_base 17: mod_base = OTHER; note = 2'-deoxy-2'-fluoroadenosine-3'-phosphate
  modified_base 18: mod_base = OTHER; note = 2'-O-methyluridine-3'-phosphate
  modified_base 19: mod_base = OTHER; note = 2'-deoxy-2'-fluoroguanosine-3'-phosphate
  modified_base 20: mod_base = OTHER; note = 2'-O-methyladenosine-3'-phosphate
  modified_base 21: mod_base = OTHER; note = 2'-deoxy-2'-fluoroadenosine
ggatcacaaaacttcaatgaa

SEQ ID NO: 944 - RNA, 21 nt, synthetic construct
  source 1..21: mol_type = other RNA
  modified_base 1: mod_base = OTHER; note = 2'-deoxy-2'-fluoroguanosine-3'-phosphate
  modified_base 2: mod_base = OTHER; note = 2'-O-methyladenosine-3'-phosphate
  modified_base 3: mod_base = OTHER; note = 2'-deoxy-2'-fluoroadenosine-3'-phosphate
  modified_base 4: mod_base = OTHER; note = 2'-O-methylguanosine-3'-phosphate
  modified_base 5: mod_base = OTHER; note = 2'-deoxy-2'-fluoroadenosine-3'-phosphate
  modified_base 6: mod_base = OTHER; note = 2'-O-methyluridine-3'-phosphate
  modified_base 7: mod_base = OTHER; note = 2'-deoxy-2'-fluoroadenosine-3'-phosphate
  modified_base 8: mod_base = OTHER; note = 2'-O-methyluridine-3'-phosphate
  modified_base 9: mod_base = OTHER; note = 2'-deoxy-2'-fluoroadenosine-3'-phosphate
  modified_base 10: mod_base = OTHER; note = 2'-deoxy-2'-fluorocytidine-3'-phosphate
  modified_base 11: mod_base = OTHER; note = 2'-deoxy-2'-fluorouridine-3'-phosphate
  modified_base 12: mod_base = OTHER; note = 2'-O-methylcytidine-3'-phosphate
  modified_base 13: mod_base = OTHER; note = 2'-deoxy-2'-fluorocytidine-3'-phosphate
  modified_base 14: mod_base = OTHER; note = 2'-O-methyladenosine-3'-phosphate
  modified_base 15: mod_base = OTHER; note = 2'-deoxy-2'-fluorouridine-3'-phosphate
  modified_base 16: mod_base = OTHER; note = 2'-O-methyladenosine-3'-phosphate
  modified_base 17: mod_base = OTHER; note = 2'-deoxy-2'-fluoroguanosine-3'-phosphate
  modified_base 18: mod_base = OTHER; note = 2'-O-methyluridine-3'-phosphate
  modified_base 19: mod_base = OTHER; note = 2'-deoxy-2'-fluoroguanosine-3'-phosphate
  modified_base 20: mod_base = OTHER; note = 2'-O-methyladenosine-3'-phosphate
  modified_base 21: mod_base = OTHER; note = 2'-deoxy-2'-fluoroadenosine
gaagatatactccatagtgaa

SEQ ID NO: 945 - RNA, 21 nt, synthetic construct
  source 1..21: mol_type = other RNA
  modified_base 1: mod_base = OTHER; note = 2'-deoxy-2'-fluoroguanosine-3'-phosphate
  modified_base 2: mod_base = OTHER; note = 2'-O-methyladenosine-3'-phosphate
  modified_base 3: mod_base = OTHER; note = 2'-deoxy-2'-fluorocytidine-3'-phosphate
  modified_base 4: mod_base = OTHER; note = 2'-O-methyladenosine-3'-phosphate
  modified_base 5: mod_base = OTHER; note = 2'-deoxy-2'-fluoroadenosine-3'-phosphate
  modified_base 6: mod_base = OTHER; note = 2'-O-methylcytidine-3'-phosphate
  modified_base 7: mod_base = OTHER; note = 2'-deoxy-2'-fluoroadenosine-3'-phosphate
  modified_base 8: mod_base = OTHER; note = 2'-O-methyladenosine-3'-phosphate
  modified_base 9: mod_base = OTHER; note = 2'-deoxy-2'-fluoroadenosine-3'-phosphate
  modified_base 10: mod_base = OTHER; note = 2'-deoxy-2'-fluorocytidine-3'-phosphate
  modified_base 11: mod_base = OTHER; note = 2'-deoxy-2'-fluoroadenosine-3'-phosphate
  modified_base 12: mod_base = OTHER; note = 2'-O-methyluridine-3'-phosphate
  modified_base 13: mod_base = OTHER; note = 2'-deoxy-2'-fluorouridine-3'-phosphate
  modified_base 14: mod_base = OTHER; note = 2'-O-methyladenosine-3'-phosphate
  modified_base 15: mod_base = OTHER; note = 2'-deoxy-2'-fluorouridine-3'-phosphate
  modified_base 16: mod_base = OTHER; note = 2'-O-methyladenosine-3'-phosphate
  modified_base 17: mod_base = OTHER; note = 2'-deoxy-2'-fluorouridine-3'-phosphate
  modified_base 18: mod_base = OTHER; note = 2'-O-methyluridine-3'-phosphate
  modified_base 19: mod_base = OTHER; note = 2'-deoxy-2'-fluoroguanosine-3'-phosphate
  modified_base 20: mod_base = OTHER; note = 2'-O-methyladenosine-3'-phosphate
  modified_base 21: mod_base = OTHER; note = 2'-deoxy-2'-fluoroadenosine
gacaacaaacattatattgaa

SEQ ID NO: 946 - RNA, 21 nt, synthetic construct
  source 1..21: mol_type = other RNA
  modified_base 1: mod_base = OTHER; note = 2'-deoxy-2'-fluoroguanosine-3'-phosphate
  modified_base 2: mod_base = OTHER; note = 2'-O-methylguanosine-3'-phosphate
  modified_base 3: mod_base = OTHER; note = 2'-deoxy-2'-fluoroguanosine-3'-phosphate
  modified_base 4: mod_base = OTHER; note = 2'-O-methyladenosine-3'-phosphate
  modified_base 5: mod_base = OTHER; note = 2'-deoxy-2'-fluoroadenosine-3'-phosphate
  modified_base 6: mod_base = OTHER; note = 2'-O-methyladenosine-3'-phosphate
  modified_base 7: mod_base = OTHER; note = 2'-deoxy-2'-fluorouridine-3'-phosphate
  modified_base 8: mod_base = OTHER; note = 2'-O-methylcytidine-3'-phosphate
  modified_base 9: mod_base = OTHER; note = 2'-deoxy-2'-fluoroadenosine-3'-phosphate
  modified_base 10: mod_base = OTHER; note = 2'-deoxy-2'-fluorocytidine-3'-phosphate
  modified_base 11: mod_base = OTHER; note = 2'-deoxy-2'-fluoroguanosine-3'-phosphate
  modified_base 12: mod_base = OTHER; note = 2'-O-methyladenosine-3'-phosphate
  modified_base 13: mod_base = OTHER; note = 2'-deoxy-2'-fluoroadenosine-3'-phosphate
  modified_base 14: mod_base = OTHER; note = 2'-O-methyladenosine-3'-phosphate
  modified_base 15: mod_base = OTHER; note = 2'-deoxy-2'-fluorocytidine-3'-phosphate
  modified_base 16: mod_base = OTHER; note = 2'-O-methylcytidine-3'-phosphate
  modified_base 17: mod_base = OTHER; note = 2'-deoxy-2'-fluoroadenosine-3'-phosphate
  modified_base 18: mod_base = OTHER; note = 2'-O-methyladenosine-3'-phosphate
  modified_base 19: mod_base = OTHER; note = 2'-deoxy-2'-fluorocytidine-3'-phosphate
  modified_base 20: mod_base = OTHER; note = 2'-O-methyluridine-3'-phosphate
  modified_base 21: mod_base = OTHER; note = 2'-deoxy-2'-fluoroadenosine
gggaaatcacgaaaccaacta

SEQ ID NO: 947 - RNA, 21 nt, synthetic construct
  source 1..21: mol_type = other RNA
  modified_base 1: mod_base = OTHER; note = 2'-deoxy-2'-fluoroadenosine-3'-phosphate
  modified_base 2: mod_base = OTHER; note = 2'-O-methylcytidine-3'-phosphate
  modified_base 3: mod_base = OTHER; note = 2'-deoxy-2'-fluorocytidine-3'-phosphate
  modified_base 4: mod_base = OTHER; note = 2'-O-methylcytidine-3'-phosphate
  modified_base 5: mod_base = OTHER; note = 2'-deoxy-2'-fluoroadenosine-3'-phosphate
  modified_base 6: mod_base = OTHER; note = 2'-O-methylguanosine-3'-phosphate
  modified_base 7: mod_base = OTHER; note = 2'-deoxy-2'-fluorocytidine-3'-phosphate
  modified_base 8: mod_base = OTHER; note = 2'-O-methyladenosine-3'-phosphate
  modified_base 9: mod_base = OTHER; note = 2'-deoxy-2'-fluoroadenosine-3'-phosphate
  modified_base 10: mod_base = OTHER; note = 2'-deoxy-2'-fluorocytidine-3'-phosphate
  modified_base 11: mod_base = OTHER; note = 2'-deoxy-2'-fluorouridine-3'-phosphate
  modified_base 12: mod_base = OTHER; note = 2'-O-methylcytidine-3'-phosphate
  modified_base 13: mod_base = OTHER; note = 2'-deoxy-2'-fluorouridine-3'-phosphate
  modified_base 14: mod_base = OTHER; note = 2'-O-methylcytidine-3'-phosphate
  modified_base 15: mod_base = OTHER; note = 2'-deoxy-2'-fluoroadenosine-3'-phosphate
  modified_base 16: mod_base = OTHER; note = 2'-O-methyladenosine-3'-phosphate
  modified_base 17: mod_base = OTHER; note = 2'-deoxy-2'-fluoroguanosine-3'-phosphate
  modified_base 18: mod_base = OTHER; note = 2'-O-methyluridine-3'-phosphate
  modified_base 19: mod_base = OTHER; note = 2'-deoxy-2'-fluorouridine-3'-phosphate
  modified_base 20: mod_base = OTHER; note = 2'-O-methyluridine-3'-phosphate
  modified_base 21: mod_base = OTHER; note = 2'-deoxy-2'-fluorouridine
acccagcaactctcaagtttt

SEQ ID NO: 948 - RNA, 21 nt, synthetic construct
  source 1..21: mol_type = other RNA
  modified_base 1: mod_base = OTHER; note = 2'-deoxy-2'-fluoroguanosine-3'-phosphate
  modified_base 2: mod_base = OTHER; note = 2'-O-methylguanosine-3'-phosphate
  modified_base 3: mod_base = OTHER; note = 2'-deoxy-2'-fluoroadenosine-3'-phosphate
  modified_base 4: mod_base = OTHER; note = 2'-O-methylcytidine-3'-phosphate
  modified_base 5: mod_base = OTHER; note = 2'-deoxy-2'-fluoroadenosine-3'-phosphate
  modified_base 6: mod_base = OTHER; note = 2'-O-methyluridine-3'-phosphate
  modified_base 7: mod_base = OTHER; note = 2'-deoxy-2'-fluorouridine-3'-phosphate
  modified_base 8: mod_base = OTHER; note = 2'-O-methyladenosine-3'-phosphate
  modified_base 9: mod_base = OTHER; note = 2'-deoxy-2'-fluoroadenosine-3'-phosphate
  modified_base 10: mod_base = OTHER; note = 2'-deoxy-2'-fluorouridine-3'-phosphate
  modified_base 11: mod_base = OTHER; note = 2'-deoxy-2'-fluorouridine-3'-phosphate
  modified_base 12: mod_base = OTHER; note = 2'-O-methylcytidine-3'-phosphate
  modified_base 13: mod_base = OTHER; note = 2'-deoxy-2'-fluoroadenosine-3'-phosphate
  modified_base 14: mod_base = OTHER; note = 2'-O-methyladenosine-3'-phosphate
  modified_base 15: mod_base = OTHER; note = 2'-deoxy-2'-fluorocytidine-3'-phosphate
  modified_base 16: mod_base = OTHER; note = 2'-O-methyladenosine-3'-phosphate
  modified_base 17: mod_base = OTHER; note = 2'-deoxy-2'-fluorouridine-3'-phosphate
  modified_base 18: mod_base = OTHER; note = 2'-O-methylcytidine-3'-phosphate
  modified_base 19: mod_base = OTHER; note = 2'-deoxy-2'-fluoroguanosine-3'-phosphate
  modified_base 20: mod_base = OTHER; note = 2'-O-methyladenosine-3'-phosphate
  modified_base 21: mod_base = OTHER; note = 2'-deoxy-2'-fluoroadenosine
ggacattaattcaacatcgaa

SEQ ID NO: 949 - RNA, 21 nt, synthetic construct
  source 1..21: mol_type = other RNA
  modified_base 1: mod_base = OTHER; note = 2'-deoxy-2'-fluoroguanosine-3'-phosphate
  modified_base 2: mod_base = OTHER; note = 2'-O-methyladenosine-3'-phosphate
  modified_base 3: mod_base = OTHER; note = 2'-deoxy-2'-fluorouridine-3'-phosphate
  modified_base 4: mod_base = OTHER; note = 2'-O-methylcytidine-3'-phosphate
  modified_base 5: mod_base = OTHER; note = 2'-deoxy-2'-fluoroadenosine-3'-phosphate
  modified_base 6: mod_base = OTHER; note = 2'-O-methylcytidine-3'-phosphate
  modified_base 7: mod_base = OTHER; note = 2'-deoxy-2'-fluoroadenosine-3'-phosphate
  modified_base 8: mod_base = OTHER; note = 2'-O-methyladenosine-3'-phosphate
  modified_base 9: mod_base = OTHER; note = 2'-deoxy-2'-fluoroadenosine-3'-phosphate
  modified_base 10: mod_base = OTHER; note = 2'-deoxy-2'-fluoroadenosine-3'-phosphate
  modified_base 11: mod_base = OTHER; note = 2'-deoxy-2'-fluorocytidine-3'-phosphate
  modified_base 12: mod_base = OTHER; note = 2'-O-methyluridine-3'-phosphate
  modified_base 13: mod_base = OTHER; note = 2'-deoxy-2'-fluorouridine-3'-phosphate
  modified_base 14: mod_base = OTHER; note = 2'-O-methylcytidine-3'-phosphate
  modified_base 15: mod_base = OTHER; note = 2'-deoxy-2'-fluoroadenosine-3'-phosphate
  modified_base 16: mod_base = OTHER; note = 2'-O-methyladenosine-3'-phosphate
  modified_base 17: mod_base = OTHER; note = 2'-deoxy-2'-fluorouridine-3'-phosphate
  modified_base 18: mod_base = OTHER; note = 2'-O-methylguanosine-3'-phosphate
  modified_base 19: mod_base = OTHER; note = 2'-deoxy-2'-fluoroadenosine-3'-phosphate
  modified_base 20: mod_base = OTHER; note = 2'-O-methyladenosine-3'-phosphate
  modified_base 21: mod_base = OTHER; note = 2'-deoxy-2'-fluoroadenosine
gatcacaaaacttcaatgaaa

SEQ ID NO: 950 - RNA, 21 nt, synthetic construct
  source 1..21: mol_type = other RNA
  modified_base 1: mod_base = OTHER; note = 2'-deoxy-2'-fluoroadenosine-3'-phosphate
  modified_base 2: mod_base = OTHER; note = 2'-O-methylcytidine-3'-phosphate
  modified_base 3: mod_base = OTHER; note = 2'-deoxy-2'-fluorouridine-3'-phosphate
  modified_base 4: mod_base = OTHER; note = 2'-O-methylcytidine-3'-phosphate
  modified_base 5: mod_base = OTHER; note = 2'-deoxy-2'-fluorocytidine-3'-phosphate
  modified_base 6: mod_base = OTHER; note = 2'-O-methyladenosine-3'-phosphate
  modified_base 7: mod_base = OTHER; note = 2'-deoxy-2'-fluorouridine-3'-phosphate
  modified_base 8: mod_base = OTHER; note = 2'-O-methyladenosine-3'-phosphate
  modified_base 9: mod_base = OTHER; note = 2'-deoxy-2'-fluoroguanosine-3'-phosphate
  modified_base 10: mod_base = OTHER; note = 2'-deoxy-2'-fluorouridine-3'-phosphate
  modified_base 11: mod_base = OTHER; note = 2'-deoxy-2'-fluoroguanosine-3'-phosphate
  modified_base 12: mod_base = OTHER; note = 2'-O-methyladenosine-3'-phosphate
  modified_base 13: mod_base = OTHER; note = 2'-deoxy-2'-fluoroadenosine-3'-phosphate
  modified_base 14: mod_base = OTHER; note = 2'-O-methylguanosine-3'-phosphate
  modified_base 15: mod_base = OTHER; note = 2'-deoxy-2'-fluorocytidine-3'-phosphate
  modified_base 16: mod_base = OTHER; note = 2'-O-methyladenosine-3'-phosphate
  modified_base 17: mod_base = OTHER; note = 2'-deoxy-2'-fluoroadenosine-3'-phosphate
  modified_base 18: mod_base = OTHER; note = 2'-O-methyluridine-3'-phosphate
  modified_base 19: mod_base = OTHER; note = 2'-deoxy-2'-fluorocytidine-3'-phosphate
  modified_base 20: mod_base = OTHER; note = 2'-O-methyluridine-3'-phosphate
  modified_base 21: mod_base = OTHER; note = 2'-deoxy-2'-fluoroadenosine
actccatagtgaagcaatcta

SEQ ID NO: 951 - RNA, 21 nt, synthetic construct
  source 1..21: mol_type = other RNA
  modified_base 1: mod_base = OTHER; note = 2'-deoxy-2'-fluoroadenosine-3'-phosphate
  modified_base 2: mod_base = OTHER; note = 2'-O-methylcytidine-3'-phosphate
  modified_base 3: mod_base = OTHER; note = 2'-deoxy-2'-fluoroadenosine-3'-phosphate
  modified_base 4: mod_base = OTHER; note = 2'-O-methyladenosine-3'-phosphate
  modified_base 5: mod_base = OTHER; note = 2'-deoxy-2'-fluorocytidine-3'-phosphate
  modified_base 6: mod_base = OTHER; note = 2'-O-methyladenosine-3'-phosphate
  modified_base 7: mod_base = OTHER; note = 2'-deoxy-2'-fluoroadenosine-3'-phosphate
  modified_base 8: mod_base = OTHER; note = 2'-O-methyladenosine-3'-phosphate
  modified_base 9: mod_base = OTHER; note = 2'-deoxy-2'-fluorocytidine-3'-phosphate
  modified_base 10: mod_base = OTHER; note = 2'-deoxy-2'-fluoroadenosine-3'-phosphate
  modified_base 11: mod_base = OTHER; note = 2'-deoxy-2'-fluorouridine-3'-phosphate
  modified_base 12: mod_base = OTHER; note = 2'-O-methyluridine-3'-phosphate
  modified_base 13: mod_base = OTHER; note = 2'-deoxy-2'-fluoroadenosine-3'-phosphate
  modified_base 14: mod_base = OTHER; note = 2'-O-methyluridine-3'-phosphate
  modified_base 15: mod_base = OTHER; note = 2'-deoxy-2'-fluoroadenosine-3'-phosphate
  modified_base 16: mod_base = OTHER; note = 2'-O-methyluridine-3'-phosphate
  modified_base 17: mod_base = OTHER; note = 2'-deoxy-2'-fluorouridine-3'-phosphate
  modified_base 18: mod_base = OTHER; note = 2'-O-methylguanosine-3'-phosphate
  modified_base 19: mod_base = OTHER; note = 2'-deoxy-2'-fluoroadenosine-3'-phosphate
  modified_base 20: mod_base = OTHER; note = 2'-O-methyladenosine-3'-phosphate
  modified_base 21: mod_base = OTHER; note = 2'-deoxy-2'-fluorouridine
acaacaaacattatattgaat

SEQ ID NO: 952 - RNA, 21 nt, synthetic construct
  source 1..21: mol_type = other RNA
  modified_base 1: mod_base = OTHER; note = 2'-deoxy-2'-fluoroguanosine-3'-phosphate
  modified_base 2: mod_base = OTHER; note = 2'-O-methylguanosine-3'-phosphate
  modified_base 3: mod_base = OTHER; note = 2'-deoxy-2'-fluoroadenosine-3'-phosphate
  modified_base 4: mod_base = OTHER; note = 2'-O-methyladenosine-3'-phosphate
  modified_base 5: mod_base = OTHER; note = 2'-deoxy-2'-fluoroadenosine-3'-phosphate
  modified_base 6: mod_base = OTHER; note = 2'-O-methyluridine-3'-phosphate
  modified_base 7: mod_base = OTHER; note = 2'-deoxy-2'-fluorocytidine-3'-phosphate
  modified_base 8: mod_base = OTHER; note = 2'-O-methyladenosine-3'-phosphate
  modified_base 9: mod_base = OTHER; note = 2'-deoxy-2'-fluorocytidine-3'-phosphate
  modified_base 10: mod_base = OTHER; note = 2'-deoxy-2'-fluoroguanosine-3'-phosphate
  modified_base 11: mod_base = OTHER; note = 2'-deoxy-2'-fluoroadenosine-3'-phosphate
  modified_base 12: mod_base = OTHER; note = 2'-O-methyladenosine-3'-phosphate
  modified_base 13: mod_base = OTHER; note = 2'-deoxy-2'-fluoroadenosine-3'-phosphate
  modified_base 14: mod_base = OTHER; note = 2'-O-methylcytidine-3'-phosphate
  modified_base 15: mod_base = OTHER; note = 2'-deoxy-2'-fluorocytidine-3'-phosphate
  modified_base 16: mod_base = OTHER; note = 2'-O-methyladenosine-3'-phosphate
  modified_base 17: mod_base = OTHER; note = 2'-deoxy-2'-fluoroadenosine-3'-phosphate
  modified_base 18: mod_base = OTHER; note = 2'-O-methylcytidine-3'-phosphate
  modified_base 19: mod_base = OTHER; note = 2'-deoxy-2'-fluorouridine-3'-phosphate
  modified_base 20: mod_base = OTHER; note = 2'-O-methyladenosine-3'-phosphate
  modified_base 21: mod_base = OTHER; note = 2'-deoxy-2'-fluorouridine
ggaaatcacgaaaccaactat

SEQ ID NO: 953 - RNA, 21 nt, synthetic construct
  source 1..21: mol_type = other RNA
  modified_base 1: mod_base = OTHER; note = 2'-deoxy-2'-fluorocytidine-3'-phosphate
  modified_base 2: mod_base = OTHER; note = 2'-O-methylcytidine-3'-phosphate
  modified_base 3: mod_base = OTHER; note = 2'-deoxy-2'-fluorocytidine-3'-phosphate
  modified_base 4: mod_base = OTHER; note = 2'-O-methyladenosine-3'-phosphate
  modified_base 5: mod_base = OTHER; note = 2'-deoxy-2'-fluoroguanosine-3'-phosphate
  modified_base 6: mod_base = OTHER; note = 2'-O-methylcytidine-3'-phosphate
  modified_base 7: mod_base = OTHER; note = 2'-deoxy-2'-fluoroadenosine-3'-phosphate
  modified_base 8: mod_base = OTHER; note = 2'-O-methyladenosine-3'-phosphate
  modified_base 9: mod_base = OTHER; note = 2'-deoxy-2'-fluorocytidine-3'-phosphate
  modified_base 10: mod_base = OTHER; note = 2'-deoxy-2'-fluorouridine-3'-phosphate
  modified_base 11: mod_base = OTHER; note = 2'-deoxy-2'-fluorocytidine-3'-phosphate
  modified_base 12: mod_base = OTHER; note = 2'-O-methyluridine-3'-phosphate
  modified_base 13: mod_base = OTHER; note = 2'-deoxy-2'-fluorocytidine-3'-phosphate
  modified_base 14: mod_base = OTHER; note = 2'-O-methyladenosine-3'-phosphate
  modified_base 15: mod_base = OTHER; note = 2'-deoxy-2'-fluoroadenosine-3'-phosphate
  modified_base 16: mod_base = OTHER; note = 2'-O-methylguanosine-3'-phosphate
  modified_base 17: mod_base = OTHER; note = 2'-deoxy-2'-fluorouridine-3'-phosphate
  modified_base 18: mod_base = OTHER; note = 2'-O-methyluridine-3'-phosphate
  modified_base 19: mod_base = OTHER; note = 2'-deoxy-2'-fluorouridine-3'-phosphate
  modified_base 20: mod_base = OTHER; note = 2'-O-methyluridine-3'-phosphate
  modified_base 21: mod_base = OTHER; note = 2'-deoxy-2'-fluorouridine
cccagcaactctcaagttttt

SEQ ID NO: 954 - RNA, 21 nt, synthetic construct
  source 1..21: mol_type = other RNA
  modified_base 1: mod_base = OTHER; note = 2'-deoxy-2'-fluoroguanosine-3'-phosphate
  modified_base 2: mod_base = OTHER; note = 2'-O-methyladenosine-3'-phosphate
  modified_base 3: mod_base = OTHER; note = 2'-deoxy-2'-fluorocytidine-3'-phosphate
  modified_base 4: mod_base = OTHER; note = 2'-O-methyladenosine-3'-phosphate
  modified_base 5: mod_base = OTHER; note = 2'-deoxy-2'-fluorouridine-3'-phosphate
  modified_base 6: mod_base = OTHER; note = 2'-O-methyluridine-3'-phosphate
  modified_base 7: mod_base = OTHER; note = 2'-deoxy-2'-fluoroadenosine-3'-phosphate
  modified_base 8: mod_base = OTHER; note = 2'-O-methyladenosine-3'-phosphate
  modified_base 9: mod_base = OTHER; note = 2'-deoxy-2'-fluorouridine-3'-phosphate
  modified_base 10: mod_base = OTHER; note = 2'-deoxy-2'-fluorouridine-3'-phosphate
  modified_base 11: mod_base = OTHER; note = 2'-deoxy-2'-fluorocytidine-3'-phosphate
  modified_base 12: mod_base = OTHER; note = 2'-O-methyladenosine-3'-phosphate
  modified_base 13: mod_base = OTHER; note = 2'-deoxy-2'-fluoroadenosine-3'-phosphate
  modified_base 14: mod_base = OTHER; note = 2'-O-methylcytidine-3'-phosphate
  modified_base 15: mod_base = OTHER; note = 2'-deoxy-2'-fluoroadenosine-3'-phosphate
  modified_base 16: mod_base = OTHER; note = 2'-O-methyluridine-3'-phosphate
  modified_base 17: mod_base = OTHER; note = 2'-deoxy-2'-fluorocytidine-3'-phosphate
  modified_base 18: mod_base = OTHER; note = 2'-O-methylguanosine-3'-phosphate
  modified_base 19: mod_base = OTHER; note = 2'-deoxy-2'-fluoroadenosine-3'-phosphate
  modified_base 20: mod_base = OTHER; note = 2'-O-methyladenosine-3'-phosphate
  modified_base 21: mod_base = OTHER; note = 2'-deoxy-2'-fluorouridine
gacattaattcaacatcgaat

SEQ ID NO: 955 - RNA, 21 nt, synthetic construct
  source 1..21: mol_type = other RNA
  modified_base 1: mod_base = OTHER; note = 2'-deoxy-2'-fluoroadenosine-3'-phosphate
  modified_base 2: mod_base = OTHER; note = 2'-O-methyladenosine-3'-phosphate
  modified_base 3: mod_base = OTHER; note = 2'-deoxy-2'-fluorocytidine-3'-phosphate
  modified_base 4: mod_base = OTHER; note = 2'-O-methylguanosine-3'-phosphate
  modified_base 5: mod_base = OTHER; note = 2'-deoxy-2'-fluorouridine-3'-phosphate
  modified_base 6: mod_base = OTHER; note = 2'-O-methylguanosine-3'-phosphate
  modified_base 7: mod_base = OTHER; note = 2'-deoxy-2'-fluoroguanosine-3'-phosphate
  modified_base 8: mod_base = OTHER; note = 2'-O-methylguanosine-3'-phosphate
  modified_base 9: mod_base = OTHER; note = 2'-deoxy-2'-fluoroadenosine-3'-phosphate
  modified_base 10: mod_base = OTHER; note = 2'-deoxy-2'-fluoroguanosine-3'-phosphate
  modified_base 11: mod_base = OTHER; note = 2'-deoxy-2'-fluoroadenosine-3'-phosphate
  modified_base 12: mod_base = OTHER; note = 2'-O-methyladenosine-3'-phosphate
  modified_base 13: mod_base = OTHER; note = 2'-deoxy-2'-fluorocytidine-3'-phosphate
  modified_base 14: mod_base = OTHER; note = 2'-O-methyluridine-3'-phosphate
  modified_base 15: mod_base = OTHER; note = 2'-deoxy-2'-fluoroadenosine-3'-phosphate
  modified_base 16: mod_base = OTHER; note = 2'-O-methylcytidine-3'-phosphate
  modified_base 17: mod_base = OTHER; note = 2'-deoxy-2'-fluoroadenosine-3'-phosphate
  modified_base 18: mod_base = OTHER; note = 2'-O-methyladenosine-3'-phosphate
  modified_base 19: mod_base = OTHER; note = 2'-deoxy-2'-fluoroadenosine-3'-phosphate
  modified_base 20: mod_base = OTHER; note = 2'-O-methyluridine-3'-phosphate
  modified_base 21: mod_base = OTHER; note = 2'-deoxy-2'-fluoroadenosine
aacgtgggagaactacaaata

SEQ ID NO: 956 - RNA, 21 nt, synthetic construct
  source 1..21: mol_type = other RNA
  modified_base 1: mod_base = OTHER; note = 2'-deoxy-2'-fluorocytidine-3'-phosphate
  modified_base 2: mod_base = OTHER; note = 2'-O-methyluridine-3'-phosphate
  modified_base 3: mod_base = OTHER; note = 2'-deoxy-2'-fluorocytidine-3'-phosphate
  modified_base 4: mod_base = OTHER; note = 2'-O-methylcytidine-3'-phosphate
  modified_base 5: mod_base = OTHER; note = 2'-deoxy-2'-fluoroadenosine-3'-phosphate
  modified_base 6: mod_base = OTHER; note = 2'-O-methyluridine-3'-phosphate
  modified_base 7: mod_base = OTHER; note = 2'-deoxy-2'-fluoroadenosine-3'-phosphate
  modified_base 8: mod_base = OTHER; note = 2'-O-methylguanosine-3'-phosphate
  modified_base 9: mod_base = OTHER; note = 2'-deoxy-2'-fluorouridine-3'-phosphate
  modified_base 10: mod_base = OTHER; note = 2'-deoxy-2'-fluoroguanosine-3'-phosphate
  modified_base 11: mod_base = OTHER; note = 2'-deoxy-2'-fluoroadenosine-3'-phosphate
  modified_base 12: mod_base = OTHER; note = 2'-O-methyladenosine-3'-phosphate
  modified_base 13: mod_base = OTHER; note = 2'-deoxy-2'-fluoroguanosine-3'-phosphate
  modified_base 14: mod_base = OTHER; note = 2'-O-methylcytidine-3'-phosphate
  modified_base 15: mod_base = OTHER; note = 2'-deoxy-2'-fluoroadenosine-3'-phosphate
  modified_base 16: mod_base = OTHER; note = 2'-O-methyladenosine-3'-phosphate
  modified_base 17: mod_base = OTHER; note = 2'-deoxy-2'-fluorouridine-3'-phosphate
  modified_base 18: mod_base = OTHER; note = 2'-O-methylcytidine-3'-phosphate
  modified_base 19: mod_base = OTHER; note = 2'-deoxy-2'-fluorouridine-3'-phosphate
  modified_base 20: mod_base = OTHER; note = 2'-O-methyladenosine-3'-phosphate
  modified_base 21: mod_base = OTHER; note = 2'-deoxy-2'-fluoroadenosine
ctccatagtgaagcaatctaa

SEQ ID NO: 957 - RNA, 21 nt, synthetic construct
  source 1..21: mol_type = other RNA
  modified_base 1: mod_base = OTHER; note = 2'-deoxy-2'-fluorocytidine-3'-phosphate
  modified_base 2: mod_base = OTHER; note = 2'-O-methyladenosine-3'-phosphate
  modified_base 3: mod_base = OTHER; note = 2'-deoxy-2'-fluoroadenosine-3'-phosphate
  modified_base 4: mod_base = OTHER; note = 2'-O-methylcytidine-3'-phosphate
  modified_base 5: mod_base = OTHER; note = 2'-deoxy-2'-fluoroadenosine-3'-phosphate
  modified_base 6: mod_base = OTHER; note = 2'-O-methyladenosine-3'-phosphate
  modified_base 7: mod_base = OTHER; note = 2'-deoxy-2'-fluoroadenosine-3'-phosphate
  modified_base 8: mod_base = OTHER; note = 2'-O-methylcytidine-3'-phosphate
  modified_base 9: mod_base = OTHER; note = 2'-deoxy-2'-fluoroadenosine-3'-phosphate
  modified_base 10: mod_base = OTHER; note = 2'-deoxy-2'-fluorouridine-3'-phosphate
  modified_base 11: mod_base = OTHER; note = 2'-deoxy-2'-fluorouridine-3'-phosphate
  modified_base 12: mod_base = OTHER; note = 2'-O-methyladenosine-3'-phosphate
  modified_base 13: mod_base = OTHER; note = 2'-deoxy-2'-fluorouridine-3'-phosphate
  modified_base 14: mod_base = OTHER; note = 2'-O-methyladenosine-3'-phosphate
  modified_base 15: mod_base = OTHER; note = 2'-deoxy-2'-fluorouridine-3'-phosphate
  modified_base 16: mod_base = OTHER; note = 2'-O-methyluridine-3'-phosphate
  modified_base 17: mod_base = OTHER; note = 2'-deoxy-2'-fluoroguanosine-3'-phosphate
  modified_base 18: mod_base = OTHER; note = 2'-O-methyladenosine-3'-phosphate
  modified_base 19: mod_base = OTHER; note = 2'-deoxy-2'-fluoroadenosine-3'-phosphate
  modified_base 20: mod_base = OTHER; note = 2'-O-methyluridine-3'-phosphate
  modified_base 21: mod_base = OTHER; note = 2'-deoxy-2'-fluoroadenosine
caacaaacattatattgaata

SEQ ID NO: 958 - RNA, 21 nt, synthetic construct
  source 1..21: mol_type = other RNA
  modified_base 1: mod_base = OTHER; note = 2'-deoxy-2'-fluoroguanosine-3'-phosphate
  modified_base 2: mod_base = OTHER; note = 2'-O-methyladenosine-3'-phosphate
  modified_base 3: mod_base = OTHER; note = 2'-deoxy-2'-fluoroadenosine-3'-phosphate
  modified_base 4: mod_base = OTHER; note = 2'-O-methyladenosine-3'-phosphate
  modified_base 5: mod_base = OTHER; note = 2'-deoxy-2'-fluorouridine-3'-phosphate
  modified_base 6: mod_base = OTHER; note = 2'-O-methylcytidine-3'-phosphate
  modified_base 7: mod_base = OTHER; note = 2'-deoxy-2'-fluoroadenosine-3'-phosphate
  modified_base 8: mod_base = OTHER; note = 2'-O-methylcytidine-3'-phosphate
  modified_base 9: mod_base = OTHER; note = 2'-deoxy-2'-fluoroguanosine-3'-phosphate
  modified_base 10: mod_base = OTHER; note = 2'-deoxy-2'-fluoroadenosine-3'-phosphate
  modified_base 11: mod_base = OTHER; note = 2'-deoxy-2'-fluoroadenosine-3'-phosphate
  modified_base 12: mod_base = OTHER; note = 2'-O-methyladenosine-3'-phosphate
  modified_base 13: mod_base = OTHER; note = 2'-deoxy-2'-fluorocytidine-3'-phosphate
  modified_base 14: mod_base = OTHER; note = 2'-O-methylcytidine-3'-phosphate
  modified_base 15: mod_base = OTHER; note = 2'-deoxy-2'-fluoroadenosine-3'-phosphate
  modified_base 16: mod_base = OTHER; note = 2'-O-methyladenosine-3'-phosphate
  modified_base 17: mod_base = OTHER; note = 2'-deoxy-2'-fluorocytidine-3'-phosphate
  modified_base 18: mod_base = OTHER; note = 2'-O-methyluridine-3'-phosphate
  modified_base 19: mod_base = OTHER; note = 2'-deoxy-2'-fluoroadenosine-3'-phosphate
  modified_base 20: mod_base = OTHER; note = 2'-O-methyluridine-3'-phosphate
  modified_base 21: mod_base = OTHER; note = 2'-deoxy-2'-fluoroadenosine
gaaatcacgaaaccaactata

SEQ ID NO: 959 - RNA, 21 nt, synthetic construct
  source 1..21: mol_type = other RNA
  modified_base 1: mod_base = OTHER; note = 2'-deoxy-2'-fluorocytidine-3'-phosphate
  modified_base 2: mod_base = OTHER; note = 2'-O-methyluridine-3'-phosphate
  modified_base 3: mod_base = OTHER; note = 2'-deoxy-2'-fluorocytidine-3'-phosphate
  modified_base 4: mod_base = OTHER; note = 2'-O-methyluridine-3'-phosphate
  modified_base 5: mod_base = OTHER; note = 2'-deoxy-2'-fluorocytidine-3'-phosphate
  modified_base 6: mod_base = OTHER; note = 2'-O-methyladenosine-3'-phosphate
  modified_base 7: mod_base = OTHER; note = 2'-deoxy-2'-fluoroadenosine-3'-phosphate
  modified_base 8: mod_base = OTHER; note = 2'-O-methylguanosine-3'-phosphate
  modified_base 9: mod_base = OTHER; note = 2'-deoxy-2'-fluorouridine-3'-phosphate
  modified_base 10: mod_base = OTHER; note = 2'-deoxy-2'-fluorouridine-3'-phosphate
  modified_base 11: mod_base = OTHER; note = 2'-deoxy-2'-fluorouridine-3'-phosphate
  modified_base 12: mod_base = OTHER; note = 2'-O-methyluridine-3'-phosphate
  modified_base 13: mod_base = OTHER; note = 2'-deoxy-2'-fluorouridine-3'-phosphate
  modified_base 14: mod_base = OTHER; note = 2'-O-methylcytidine-3'-phosphate
  modified_base 15: mod_base = OTHER; note = 2'-deoxy-2'-fluoroadenosine-3'-phosphate
  modified_base 16: mod_base = OTHER; note = 2'-O-methyluridine-3'-phosphate
  modified_base 17: mod_base = OTHER; note = 2'-deoxy-2'-fluoroguanosine-3'-phosphate
  modified_base 18: mod_base = OTHER; note = 2'-O-methyluridine-3'-phosphate
  modified_base 19: mod_base = OTHER; note = 2'-deoxy-2'-fluorocytidine-3'-phosphate
  modified_base 20: mod_base = OTHER; note = 2'-O-methyluridine-3'-phosphate
  modified_base 21: mod_base = OTHER; note = 2'-deoxy-2'-fluoroadenosine
ctctcaagtttttcatgtcta

SEQ ID NO: 960 - RNA, 21 nt, synthetic construct
  source 1..21: mol_type = other RNA
  modified_base 1: mod_base = OTHER; note = 2'-deoxy-2'-fluoroadenosine-3'-phosphate
  modified_base 2: mod_base = OTHER; note = 2'-O-methylcytidine-3'-phosphate
  modified_base 3: mod_base = OTHER; note = 2'-deoxy-2'-fluoroadenosine-3'-phosphate
  modified_base 4: mod_base = OTHER; note = 2'-O-methyluridine-3'-phosphate
  modified_base 5: mod_base = OTHER; note = 2'-deoxy-2'-fluorouridine-3'-phosphate
  modified_base 6: mod_base = OTHER; note = 2'-O-methyladenosine-3'-phosphate
  modified_base 7: mod_base = OTHER; note = 2'-deoxy-2'-fluoroadenosine-3'-phosphate
  modified_base 8: mod_base = OTHER; note = 2'-O-methyluridine-3'-phosphate
  modified_base 9: mod_base = OTHER; note = 2'-deoxy-2'-fluorouridine-3'-phosphate
  modified_base 10: mod_base = OTHER; note = 2'-deoxy-2'-fluorocytidine-3'-phosphate
  modified_base 11: mod_base = OTHER; note = 2'-deoxy-2'-fluoroadenosine-3'-phosphate
  modified_base 12: mod_base = OTHER; note = 2'-O-methyladenosine-3'-phosphate
  modified_base 13: mod_base = OTHER; note = 2'-deoxy-2'-fluorocytidine-3'-phosphate
  modified_base 14: mod_base = OTHER; note = 2'-O-methyladenosine-3'-phosphate
  modified_base 15: mod_base = OTHER; note = 2'-deoxy-2'-fluorouridine-3'-phosphate
  modified_base 16: mod_base = OTHER; note = 2'-O-methylcytidine-3'-phosphate
  modified_base 17: mod_base = OTHER; note = 2'-deoxy-2'-fluoroguanosine-3'-phosphate
  modified_base 18: mod_base = OTHER; note = 2'-O-methyladenosine-3'-phosphate
  modified_base 19: mod_base = OTHER; note = 2'-deoxy-2'-fluoroadenosine-3'-phosphate
  modified_base 20: mod_base = OTHER; note = 2'-O-methyluridine-3'-phosphate
  modified_base 21: mod_base = OTHER; note = 2'-deoxy-2'-fluoroadenosine
acattaattcaacatcgaata

SEQ ID NO: 961 - RNA, 21 nt, synthetic construct
  source 1..21: mol_type = other RNA
  modified_base 1: mod_base = OTHER; note = 2'-deoxy-2'-fluoroguanosine-3'-phosphate
  modified_base 2: mod_base = OTHER; note = 2'-O-methylguanosine-3'-phosphate
  modified_base 3: mod_base = OTHER; note = 2'-deoxy-2'-fluoroguanosine-3'-phosphate
  modified_base 4: mod_base = OTHER; note = 2'-O-methyladenosine-3'-phosphate
  modified_base 5: mod_base = OTHER; note = 2'-deoxy-2'-fluoroguanosine-3'-phosphate
  modified_base 6: mod_base = OTHER; note = 2'-O-methyladenosine-3'-phosphate
  modified_base 7: mod_base = OTHER; note = 2'-deoxy-2'-fluoroadenosine-3'-phosphate
  modified_base 8: mod_base = OTHER; note = 2'-O-methylcytidine-3'-phosphate
  modified_base 9: mod_base = OTHER; note = 2'-deoxy-2'-fluorouridine-3'-phosphate
  modified_base 10: mod_base = OTHER; note = 2'-deoxy-2'-fluoroadenosine-3'-phosphate
  modified_base 11: mod_base = OTHER; note = 2'-deoxy-2'-fluorocytidine-3'-phosphate
  modified_base 12: mod_base = OTHER; note = 2'-O-methyladenosine-3'-phosphate
  modified_base 13: mod_base = OTHER; note = 2'-deoxy-2'-fluoroadenosine-3'-phosphate
  modified_base 14: mod_base = OTHER; note = 2'-O-methyladenosine-3'-phosphate
  modified_base 15: mod_base = OTHER; note = 2'-deoxy-2'-fluorouridine-3'-phosphate
  modified_base 16: mod_base = OTHER; note = 2'-O-methyladenosine-3'-phosphate
  modified_base 17: mod_base = OTHER; note = 2'-deoxy-2'-fluorouridine-3'-phosphate
  modified_base 18: mod_base = OTHER; note = 2'-O-methylguanosine-3'-phosphate
  modified_base 19: mod_base = OTHER; note = 2'-deoxy-2'-fluoroguanosine-3'-phosphate
  modified_base 20: mod_base = OTHER; note = 2'-O-methyluridine-3'-phosphate
  modified_base 21: mod_base = OTHER; note = 2'-deoxy-2'-fluorouridine
gggagaactacaaatatggtt

SEQ ID NO: 962 - RNA, 21 nt, synthetic construct
  source 1..21: mol_type = other RNA
  modified_base 1: mod_base = OTHER; note = 2'-deoxy-2'-fluorouridine-3'-phosphate
  modified_base 2: mod_base = OTHER; note = 2'-O-methylcytidine-3'-phosphate
  modified_base 3: mod_base = OTHER; note = 2'-deoxy-2'-fluorocytidine-3'-phosphate
  modified_base 4: mod_base = OTHER; note = 2'-O-methyladenosine-3'-phosphate
  modified_base 5: mod_base = OTHER; note = 2'-deoxy-2'-fluorouridine-3'-phosphate
  modified_base 6: mod_base = OTHER; note = 2'-O-methyladenosine-3'-phosphate
  modified_base 7: mod_base = OTHER; note = 2'-deoxy-2'-fluoroguanosine-3'-phosphate
  modified_base 8: mod_base = OTHER; note = 2'-O-methyluridine-3'-phosphate
  modified_base 9: mod_base = OTHER; note = 2'-deoxy-2'-fluoroguanosine-3'-phosphate
  modified_base 10: mod_base = OTHER; note = 2'-deoxy-2'-fluoroadenosine-3'-phosphate
  modified_base 11: mod_base = OTHER; note = 2'-deoxy-2'-fluoroadenosine-3'-phosphate
  modified_base 12: mod_base = OTHER; note = 2'-O-methylguanosine-3'-phosphate
  modified_base 13: mod_base = OTHER; note = 2'-deoxy-2'-fluorocytidine-3'-phosphate
  modified_base 14: mod_base = OTHER; note = 2'-O-methyladenosine-3'-phosphate
  modified_base 15: mod_base = OTHER; note = 2'-deoxy-2'-fluoroadenosine-3'-phosphate
  modified_base 16: mod_base = OTHER; note = 2'-O-methyluridine-3'-phosphate
  modified_base 17: mod_base = OTHER; note = 2'-deoxy-2'-fluorocytidine-3'-phosphate
  modified_base 18: mod_base = OTHER; note = 2'-O-methyluridine-3'-phosphate
  modified_base 19: mod_base = OTHER; note = 2'-deoxy-2'-fluoroadenosine-3'-phosphate
  modified_base 20: mod_base = OTHER; note = 2'-O-methyladenosine-3'-phosphate
  modified_base 21: mod_base = OTHER; note = 2'-deoxy-2'-fluorouridine
tccatagtgaagcaatctaat

SEQ ID NO: 963 - RNA, 21 nt, synthetic construct
  source 1..21: mol_type = other RNA
  modified_base 1: mod_base = OTHER; note = 2'-deoxy-2'-fluoroadenosine-3'-phosphate
  modified_base 2: mod_base = OTHER; note = 2'-O-methyladenosine-3'-phosphate
  modified_base 3: mod_base = OTHER; note = 2'-deoxy-2'-fluorocytidine-3'-phosphate
  modified_base 4: mod_base = OTHER; note = 2'-O-methyladenosine-3'-phosphate
  modified_base 5: mod_base = OTHER; note = 2'-deoxy-2'-fluoroadenosine-3'-phosphate
  modified_base 6: mod_base = OTHER; note = 2'-O-methyladenosine-3'-phosphate
  modified_base 7: mod_base = OTHER; note = 2'-deoxy-2'-fluorocytidine-3'-phosphate
  modified_base 8: mod_base = OTHER; note = 2'-O-methyladenosine-3'-phosphate
  modified_base 9: mod_base = OTHER; note = 2'-deoxy-2'-fluorouridine-3'-phosphate
  modified_base 10: mod_base = OTHER; note = 2'-deoxy-2'-fluorouridine-3'-phosphate
  modified_base 11: mod_base = OTHER; note = 2'-deoxy-2'-fluoroadenosine-3'-phosphate
  modified_base 12: mod_base = OTHER; note = 2'-O-methyluridine-3'-phosphate
  modified_base 13: mod_base = OTHER; note = 2'-deoxy-2'-fluoroadenosine-3'-phosphate
  modified_base 14: mod_base = OTHER; note = 2'-O-methyluridine-3'-phosphate
  modified_base 15: mod_base = OTHER; note = 2'-deoxy-2'-fluorouridine-3'-phosphate
  modified_base 16: mod_base = OTHER; note = 2'-O-methylguanosine-3'-phosphate
  modified_base 17: mod_base = OTHER; note = 2'-deoxy-2'-fluoroadenosine-3'-phosphate
  modified_base 18: mod_base = OTHER; note = 2'-O-methyladenosine-3'-phosphate
  modified_base 19: mod_base = OTHER; note = 2'-deoxy-2'-fluorouridine-3'-phosphate
  modified_base 20: mod_base = OTHER; note = 2'-O-methyladenosine-3'-phosphate
  modified_base 21: mod_base = OTHER; note = 2'-deoxy-2'-fluorouridine
aacaaacattatattgaatat

SEQ ID NO: 964 - RNA, 21 nt, synthetic construct
  source 1..21: mol_type = other RNA
  modified_base 1: mod_base = OTHER; note = 2'-deoxy-2'-fluorouridine-3'-phosphate
  modified_base 2: mod_base = OTHER; note = 2'-O-methylguanosine-3'-phosphate
  modified_base 3: mod_base = OTHER; note = 2'-deoxy-2'-fluoroguanosine-3'-phosphate
  modified_base 4: mod_base = OTHER; note = 2'-O-methylcytidine-3'-phosphate
  modified_base 5: mod_base = OTHER; note = 2'-deoxy-2'-fluoroadenosine-3'-phosphate
  modified_base 6: mod_base = OTHER; note = 2'-O-methyladenosine-3'-phosphate
  modified_base 7: mod_base = OTHER; note = 2'-deoxy-2'-fluorouridine-3'-phosphate
  modified_base 8: mod_base = OTHER; note = 2'-O-methylguanosine-3'-phosphate
  modified_base 9: mod_base = OTHER; note = 2'-deoxy-2'-fluorouridine-3'-phosphate
  modified_base 10: mod_base = OTHER; note = 2'-deoxy-2'-fluorocytidine-3'-phosphate
  modified_base 11: mod_base = OTHER; note = 2'-deoxy-2'-fluorocytidine-3'-phosphate
  modified_base 12: mod_base = OTHER; note = 2'-O-methylcytidine-3'-phosphate
  modified_base 13: mod_base = OTHER; note = 2'-deoxy-2'-fluorocytidine-3'-phosphate
  modified_base 14: mod_base = OTHER; note = 2'-O-methyladenosine-3'-phosphate
  modified_base 15: mod_base = OTHER; note = 2'-deoxy-2'-fluoroadenosine-3'-phosphate
  modified_base 16: mod_base = OTHER; note = 2'-O-methyluridine-3'-phosphate
  modified_base 17: mod_base = OTHER; note = 2'-deoxy-2'-fluoroguanosine-3'-phosphate
  modified_base 18: mod_base = OTHER; note = 2'-O-methylcytidine-3'-phosphate
  modified_base 19: mod_base = OTHER; note = 2'-deoxy-2'-fluoroadenosine-3'-phosphate
  modified_base 20: mod_base = OTHER; note = 2'-O-methyladenosine-3'-phosphate
  modified_base 21: mod_base = OTHER; note = 2'-deoxy-2'-fluorouridine
tggcaatgtccccaatgcaat

SEQ ID NO: 965 - RNA, 21 nt, synthetic construct
  source 1..21: mol_type = other RNA
  modified_base 1: mod_base = OTHER; note = 2'-deoxy-2'-fluorouridine-3'-phosphate
  modified_base 2: mod_base = OTHER; note = 2'-O-methylcytidine-3'-phosphate
  modified_base 3: mod_base = OTHER; note = 2'-deoxy-2'-fluoroadenosine-3'-phosphate
  modified_base 4: mod_base = OTHER; note = 2'-O-methylguanosine-3'-phosphate
  modified_base 5: mod_base = OTHER; note = 2'-deoxy-2'-fluoroguanosine-3'-phosphate
  modified_base 6: mod_base = OTHER; note = 2'-O-methyluridine-3'-phosphate
  modified_base 7: mod_base = OTHER; note = 2'-deoxy-2'-fluoroadenosine-3'-phosphate
  modified_base 8: mod_base = OTHER; note = 2'-O-methylguanosine-3'-phosphate
  modified_base 9: mod_base = OTHER; note = 2'-deoxy-2'-fluorouridine-3'-phosphate
  modified_base 10: mod_base = OTHER; note = 2'-deoxy-2'-fluorocytidine-3'-phosphate
  modified_base 11: mod_base = OTHER; note = 2'-deoxy-2'-fluorocytidine-3'-phosphate
  modified_base 12: mod_base = OTHER; note = 2'-O-methyladenosine-3'-phosphate
  modified_base 13: mod_base = OTHER; note = 2'-deoxy-2'-fluorouridine-3'-phosphate
  modified_base 14: mod_base = OTHER; note = 2'-O-methylguanosine-3'-phosphate
  modified_base 15: mod_base = OTHER; note = 2'-deoxy-2'-fluoroguanosine-3'-phosphate
  modified_base 16: mod_base = OTHER; note = 2'-O-methyladenosine-3'-phosphate
  modified_base 17: mod_base = OTHER; note = 2'-deoxy-2'-fluorocytidine-3'-phosphate
  modified_base 18: mod_base = OTHER; note = 2'-O-methyladenosine-3'-phosphate
  modified_base 19: mod_base = OTHER; note = 2'-deoxy-2'-fluorouridine-3'-phosphate
  modified_base 20: mod_base = OTHER; note = 2'-O-methyluridine-3'-phosphate
  modified_base 21: mod_base = OTHER; note = 2'-deoxy-2'-fluoroadenosine
tcaggtagtccatggacatta

SEQ ID NO: 966 - RNA, 21 nt, synthetic construct
  source 1..21: mol_type = other RNA
  modified_base 1: mod_base = OTHER; note = 2'-deoxy-2'-fluorouridine-3'-phosphate
  modified_base 2: mod_base = OTHER; note = 2'-O-methyluridine-3'-phosphate
  modified_base 3: mod_base = OTHER; note = 2'-deoxy-2'-fluoroadenosine-3'-phosphate
  modified_base 4: mod_base = OTHER; note = 2'-O-methyladenosine-3'-phosphate
  modified_base 5: mod_base = OTHER; note = 2'-deoxy-2'-fluorouridine-3'-phosphate
  modified_base 6: mod_base = OTHER; note = 2'-O-methyluridine-3'-phosphate
  modified_base 7: mod_base = OTHER; note = 2'-deoxy-2'-fluorocytidine-3'-phosphate
  modified_base 8: mod_base = OTHER; note = 2'-O-methyladenosine-3'-phosphate
  modified_base 9: mod_base = OTHER; note = 2'-deoxy-2'-fluoroadenosine-3'-phosphate
  modified_base 10: mod_base = OTHER; note = 2'-deoxy-2'-fluorocytidine-3'-phosphate
  modified_base 11: mod_base = OTHER; note = 2'-deoxy-2'-fluoroadenosine-3'-phosphate
  modified_base 12: mod_base = OTHER; note = 2'-O-methyluridine-3'-phosphate
  modified_base 13: mod_base = OTHER; note = 2'-deoxy-2'-fluorocytidine-3'-phosphate
  modified_base 14: mod_base = OTHER; note = 2'-O-methylguanosine-3'-phosphate
  modified_base 15: mod_base = OTHER; note = 2'-deoxy-2'-fluoroadenosine-3'-phosphate
  modified_base 16: mod_base = OTHER; note = 2'-O-methyladenosine-3'-phosphate
  modified_base 17: mod_base = OTHER; note = 2'-deoxy-2'-fluorouridine-3'-phosphate
  modified_base 18: mod_base = OTHER; note = 2'-O-methyladenosine-3'-phosphate
  modified_base 19: mod_base = OTHER; note = 2'-deoxy-2'-fluoroguanosine-3'-phosphate
  modified_base 20: mod_base = OTHER; note = 2'-O-methyladenosine-3'-phosphate
  modified_base 21: mod_base = OTHER; note = 2'-deoxy-2'-fluorouridine
ttaattcaacatcgaatagat

SEQ ID NO: 967 - RNA, 21 nt, synthetic construct
  source 1..21: mol_type = other RNA
  modified_base 1: mod_base = OTHER; note = 2'-deoxy-2'-fluoroguanosine-3'-phosphate
  modified_base 2: mod_base = OTHER; note = 2'-O-methylguanosine-3'-phosphate
  modified_base 3: mod_base = OTHER; note = 2'-deoxy-2'-fluoroadenosine-3'-phosphate
  modified_base 4: mod_base = OTHER; note = 2'-O-methylguanosine-3'-phosphate
  modified_base 5: mod_base = OTHER; note = 2'-deoxy-2'-fluoroadenosine-3'-phosphate
  modified_base 6: mod_base = OTHER; note = 2'-O-methyladenosine-3'-phosphate
  modified_base 7: mod_base = OTHER; note = 2'-deoxy-2'-fluorocytidine-3'-phosphate
  modified_base 8: mod_base = OTHER; note = 2'-O-methyluridine-3'-phosphate
  modified_base 9: mod_base = OTHER; note = 2'-deoxy-2'-fluoroadenosine-3'-phosphate
  modified_base 10: mod_base = OTHER; note = 2'-deoxy-2'-fluorocytidine-3'-phosphate
  modified_base 11: mod_base = OTHER; note = 2'-deoxy-2'-fluoroadenosine-3'-phosphate
  modified_base 12: mod_base = OTHER; note = 2'-O-methyladenosine-3'-phosphate
  modified_base 13: mod_base = OTHER; note = 2'-deoxy-2'-fluoroadenosine-3'-phosphate
  modified_base 14: mod_base = OTHER; note = 2'-O-methyluridine-3'-phosphate
  modified_base 15: mod_base = OTHER; note = 2'-deoxy-2'-fluoroadenosine-3'-phosphate
  modified_base 16: mod_base = OTHER; note = 2'-O-methyluridine-3'-phosphate
  modified_base 17: mod_base = OTHER; note = 2'-deoxy-2'-fluoroguanosine-3'-phosphate
  modified_base 18: mod_base = OTHER; note = 2'-O-methylguanosine-3'-phosphate
  modified_base 19: mod_base = OTHER; note = 2'-deoxy-2'-fluorouridine-3'-phosphate
  modified_base 20: mod_base = OTHER; note = 2'-O-methyluridine-3'-phosphate
  modified_base 21: mod_base = OTHER; note = 2'-deoxy-2'-fluorouridine
ggagaactacaaatatggttt

SEQ ID NO: 968 - RNA, 21 nt, synthetic construct
  source 1..21: mol_type = other RNA
  modified_base 1: mod_base = OTHER; note = 2'-deoxy-2'-fluorocytidine-3'-phosphate
  modified_base 2: mod_base = OTHER; note = 2'-O-methylcytidine-3'-phosphate
  modified_base 3: mod_base = OTHER; note = 2'-deoxy-2'-fluoroadenosine-3'-phosphate
  modified_base 4: mod_base = OTHER; note = 2'-O-methyluridine-3'-phosphate
  modified_base 5: mod_base = OTHER; note = 2'-deoxy-2'-fluoroadenosine-3'-phosphate
  modified_base 6: mod_base = OTHER; note = 2'-O-methylguanosine-3'-phosphate
  modified_base 7: mod_base = OTHER; note = 2'-deoxy-2'-fluorouridine-3'-phosphate
  modified_base 8: mod_base = OTHER; note = 2'-O-methylguanosine-3'-phosphate
  modified_base 9: mod_base = OTHER; note = 2'-deoxy-2'-fluoroadenosine-3'-phosphate
  modified_base 10: mod_base = OTHER; note = 2'-deoxy-2'-fluoroadenosine-3'-phosphate
  modified_base 11: mod_base = OTHER; note = 2'-deoxy-2'-fluoroguanosine-3'-phosphate
  modified_base 12: mod_base = OTHER; note = 2'-O-methylcytidine-3'-phosphate
  modified_base 13: mod_base = OTHER; note = 2'-deoxy-2'-fluoroadenosine-3'-phosphate
  modified_base 14: mod_base = OTHER; note = 2'-O-methyladenosine-3'-phosphate
  modified_base 15: mod_base = OTHER; note = 2'-deoxy-2'-fluorouridine-3'-phosphate
  modified_base 16: mod_base = OTHER; note = 2'-O-methylcytidine-3'-phosphate
  modified_base 17: mod_base = OTHER; note = 2'-deoxy-2'-fluorouridine-3'-phosphate
  modified_base 18: mod_base = OTHER; note = 2'-O-methyladenosine-3'-phosphate
  modified_base 19: mod_base = OTHER; note = 2'-deoxy-2'-fluoroadenosine-3'-phosphate
  modified_base 20: mod_base = OTHER; note = 2'-O-methyluridine-3'-phosphate
  modified_base 21: mod_base = OTHER; note = 2'-deoxy-2'-fluorouridine
ccatagtgaagcaatctaatt

SEQ ID NO: 969 - RNA, 21 nt, synthetic construct
  source 1..21: mol_type = other RNA
  modified_base 1: mod_base = OTHER; note = 2'-deoxy-2'-fluoroadenosine-3'-phosphate
  modified_base 2: mod_base = OTHER; note = 2'-O-methylcytidine-3'-phosphate
  modified_base 3: mod_base = OTHER; note = 2'-deoxy-2'-fluoroadenosine-3'-phosphate
  modified_base 4: mod_base = OTHER; note = 2'-O-methyladenosine-3'-phosphate
  modified_base 5: mod_base = OTHER; note = 2'-deoxy-2'-fluoroadenosine-3'-phosphate
  modified_base 6: mod_base = OTHER; note = 2'-O-methylcytidine-3'-phosphate
  modified_base 7: mod_base = OTHER; note = 2'-deoxy-2'-fluoroadenosine-3'-phosphate
  modified_base 8: mod_base = OTHER; note = 2'-O-methyluridine-3'-phosphate
  modified_base 9: mod_base = OTHER; note = 2'-deoxy-2'-fluorouridine-3'-phosphate
  modified_base 10: mod_base = OTHER; note = 2'-deoxy-2'-fluoroadenosine-3'-phosphate
  modified_base 11: mod_base = OTHER; note = 2'-deoxy-2'-fluorouridine-3'-phosphate
  modified_base 12: mod_base = OTHER; note = 2'-O-methyladenosine-3'-phosphate
  modified_base 13: mod_base = OTHER; note = 2'-deoxy-2'-fluorouridine-3'-phosphate
  modified_base 14: mod_base = OTHER; note = 2'-O-methyluridine-3'-phosphate
  modified_base 15: mod_base = OTHER; note = 2'-deoxy-2'-fluoroguanosine-3'-phosphate
  modified_base 16: mod_base = OTHER; note = 2'-O-methyladenosine-3'-phosphate
  modified_base 17: mod_base = OTHER; note = 2'-deoxy-2'-fluoroadenosine-3'-phosphate
  modified_base 18: mod_base = OTHER; note = 2'-O-methyluridine-3'-phosphate
  modified_base 19: mod_base = OTHER; note = 2'-deoxy-2'-fluoroadenosine-3'-phosphate
  modified_base 20: mod_base = OTHER; note = 2'-O-methyluridine-3'-phosphate
  modified_base 21: mod_base = OTHER; note = 2'-deoxy-2'-fluorouridine
acaaacattatattgaatatt

SEQ ID NO: 970 - RNA, 21 nt, synthetic construct
  source 1..21: mol_type = other RNA
  modified_base 1: mod_base = OTHER; note = 2'-deoxy-2'-fluoroadenosine-3'-phosphate
  modified_base 2: mod_base = OTHER; note = 2'-O-methyladenosine-3'-phosphate
  modified_base 3: mod_base = OTHER; note = 2'-deoxy-2'-fluorouridine-3'-phosphate
  modified_base 4: mod_base = OTHER; note = 2'-O-methylguanosine-3'-phosphate
  modified_base 5: mod_base = OTHER; note = 2'-deoxy-2'-fluorocytidine-3'-phosphate
  modified_base 6: mod_base = OTHER; note = 2'-O-methyladenosine-3'-phosphate
  modified_base 7: mod_base = OTHER; note = 2'-deoxy-2'-fluoroadenosine-3'-phosphate
  modified_base 8: mod_base = OTHER; note = 2'-O-methyluridine-3'-phosphate
  modified_base 9: mod_base = OTHER; note = 2'-deoxy-2'-fluorocytidine-3'-phosphate
  modified_base 10: mod_base = OTHER; note = 2'-deoxy-2'-fluorocytidine-3'-phosphate
  modified_base 11: mod_base = OTHER; note = 2'-deoxy-2'-fluorocytidine-3'-phosphate
  modified_base 12: mod_base = OTHER; note = 2'-O-methylguanosine-3'-phosphate
  modified_base 13: mod_base = OTHER; note = 2'-deoxy-2'-fluoroguanosine-3'-phosphate
  modified_base 14: mod_base = OTHER; note = 2'-O-methyladenosine-3'-phosphate
  modified_base 15: mod_base = OTHER; note = 2'-deoxy-2'-fluoroadenosine-3'-phosphate
  modified_base 16: mod_base = OTHER; note = 2'-O-methyladenosine-3'-phosphate
  modified_base 17: mod_base = OTHER; note = 2'-deoxy-2'-fluoroadenosine-3'-phosphate
  modified_base 18: mod_base = OTHER; note = 2'-O-methylcytidine-3'-phosphate
  modified_base 19: mod_base = OTHER; note = 2'-deoxy-2'-fluoroadenosine-3'-phosphate
  modified_base 20: mod_base = OTHER; note = 2'-O-methyladenosine-3'-phosphate
  modified_base 21: mod_base = OTHER; note = 2'-deoxy-2'-fluoroadenosine
aatgcaatcccggaaaacaaa

SEQ ID NO: 971 - RNA, 21 nt, synthetic construct
  source 1..21: mol_type = other RNA
  modified_base 1: mod_base = OTHER; note = 2'-deoxy-2'-fluorocytidine-3'-phosphate
  modified_base 2: mod_base = OTHER; note = 2'-O-methyladenosine-3'-phosphate
  modified_base 3: mod_base = OTHER; note = 2'-deoxy-2'-fluoroguanosine-3'-phosphate
  modified_base 4: mod_base = OTHER; note = 2'-O-methylguanosine-3'-phosphate
  modified_base 5: mod_base = OTHER; note = 2'-deoxy-2'-fluorouridine-3'-phosphate
  modified_base 6: mod_base = OTHER; note = 2'-O-methyladenosine-3'-phosphate
  modified_base 7: mod_base = OTHER; note = 2'-deoxy-2'-fluoroguanosine-3'-phosphate
  modified_base 8: mod_base = OTHER; note = 2'-O-methyluridine-3'-phosphate
  modified_base 9: mod_base = OTHER; note = 2'-deoxy-2'-fluorocytidine-3'-phosphate
  modified_base 10: mod_base = OTHER; note = 2'-deoxy-2'-fluorocytidine-3'-phosphate
  modified_base 11: mod_base = OTHER; note = 2'-deoxy-2'-fluoroadenosine-3'-phosphate
  modified_base 12: mod_base = OTHER; note = 2'-O-methyluridine-3'-phosphate
  modified_base 13: mod_base = OTHER; note = 2'-deoxy-2'-fluoroguanosine-3'-phosphate
  modified_base 14: mod_base = OTHER; note = 2'-O-methylguanosine-3'-phosphate
  modified_base 15: mod_base = OTHER; note = 2'-deoxy-2'-fluoroadenosine-3'-phosphate
  modified_base 16: mod_base = OTHER; note = 2'-O-methylcytidine-3'-phosphate
  modified_base 17: mod_base = OTHER; note = 2'-deoxy-2'-fluoroadenosine-3'-phosphate
  modified_base 18: mod_base = OTHER; note = 2'-O-methyluridine-3'-phosphate
  modified_base 19: mod_base = OTHER; note = 2'-deoxy-2'-fluorouridine-3'-phosphate
  modified_base 20: mod_base = OTHER; note = 2'-O-methyladenosine-3'-phosphate
  modified_base 21: mod_base = OTHER; note = 2'-deoxy-2'-fluoroadenosine
caggtagtccatggacattaa

SEQ ID NO: 972 - RNA, 21 nt, synthetic construct
  source 1..21: mol_type = other RNA
  modified_base 1: mod_base = OTHER; note = 2'-deoxy-2'-fluorouridine-3'-phosphate
  modified_base 2: mod_base = OTHER; note = 2'-O-methyluridine-3'-phosphate
  modified_base 3: mod_base = OTHER; note = 2'-deoxy-2'-fluorocytidine-3'-phosphate
  modified_base 4: mod_base = OTHER; note = 2'-O-methyladenosine-3'-phosphate
  modified_base 5: mod_base = OTHER; note = 2'-deoxy-2'-fluoroadenosine-3'-phosphate
  modified_base 6: mod_base = OTHER; note = 2'-O-methylcytidine-3'-phosphate
  modified_base 7: mod_base = OTHER; note = 2'-deoxy-2'-fluoroadenosine-3'-phosphate
  modified_base 8: mod_base = OTHER; note = 2'-O-methyluridine-3'-phosphate
  modified_base 9: mod_base = OTHER; note = 2'-deoxy-2'-fluorocytidine-3'-phosphate
  modified_base 10: mod_base = OTHER; note = 2'-deoxy-2'-fluoroguanosine-3'-phosphate
  modified_base 11: mod_base = OTHER; note = 2'-deoxy-2'-fluoroadenosine-3'-phosphate
  modified_base 12: mod_base = OTHER; note = 2'-O-methyladenosine-3'-phosphate
  modified_base 13: mod_base = OTHER; note = 2'-deoxy-2'-fluorouridine-3'-phosphate
  modified_base 14: mod_base = OTHER; note = 2'-O-methyladenosine-3'-phosphate
  modified_base 15: mod_base = OTHER; note = 2'-deoxy-2'-fluoroguanosine-3'-phosphate
  modified_base 16: mod_base = OTHER; note = 2'-O-methyladenosine-3'-phosphate
  modified_base 17: mod_base = OTHER; note = 2'-deoxy-2'-fluorouridine-3'-phosphate
  modified_base 18: mod_base = OTHER; note = 2'-O-methylguanosine-3'-phosphate
  modified_base 19: mod_base = OTHER; note = 2'-deoxy-2'-fluoroguanosine-3'-phosphate
  modified_base 20: mod_base = OTHER; note = 2'-O-methyladenosine-3'-phosphate
  modified_base 21: mod_base = OTHER; note = 2'-deoxy-2'-fluorouridine
ttcaacatcgaatagatggat

SEQ ID NO: 973 - RNA, 21 nt, synthetic construct
  source 1..21: mol_type = other RNA
  modified_base 1: mod_base = OTHER; note = 2'-deoxy-2'-fluoroguanosine-3'-phosphate
  modified_base 2: mod_base = OTHER; note = 2'-O-methyluridine-3'-phosphate
  modified_base 3: mod_base = OTHER; note = 2'-deoxy-2'-fluorouridine-3'-phosphate
  modified_base 4: mod_base = OTHER; note = 2'-O-methylguanosine-3'-phosphate
  modified_base 5: mod_base = OTHER; note = 2'-deoxy-2'-fluoroguanosine-3'-phosphate
  modified_base 6: mod_base = OTHER; note = 2'-O-methylguanosine-3'-phosphate
  modified_base 7: mod_base = OTHER; note = 2'-deoxy-2'-fluorocytidine-3'-phosphate
  modified_base 8: mod_base = OTHER; note = 2'-O-methylcytidine-3'-phosphate
  modified_base 9: mod_base = OTHER; note = 2'-deoxy-2'-fluorouridine-3'-phosphate
  modified_base 10: mod_base = OTHER; note = 2'-deoxy-2'-fluoroadenosine-3'-phosphate
  modified_base 11: mod_base = OTHER; note = 2'-deoxy-2'-fluoroguanosine-3'-phosphate
  modified_base 12: mod_base = OTHER; note = 2'-O-methyladenosine-3'-phosphate
  modified_base 13: mod_base = OTHER; note = 2'-deoxy-2'-fluoroguanosine-3'-phosphate
  modified_base 14: mod_base = OTHER; note = 2'-O-methyladenosine-3'-phosphate
  modified_base 15: mod_base = OTHER; note = 2'-deoxy-2'-fluoroadenosine-3'-phosphate
  modified_base 16: mod_base = OTHER; note = 2'-O-methylguanosine-3'-phosphate
  modified_base 17: mod_base = OTHER; note = 2'-deoxy-2'-fluoroadenosine-3'-phosphate
  modified_base 18: mod_base = OTHER; note = 2'-O-methyluridine-3'-phosphate
  modified_base 19: mod_base = OTHER; note = 2'-deoxy-2'-fluoroadenosine-3'-phosphate
  modified_base 20: mod_base = OTHER; note = 2'-O-methyluridine-3'-phosphate
  modified_base 21: mod_base = OTHER; note = 2'-deoxy-2'-fluoroadenosine
gttgggcctagagaagatata

SEQ ID NO: 974 - RNA, 21 nt, synthetic construct
  source 1..21: mol_type = other RNA
  modified_base 1: mod_base = OTHER; note = 2'-deoxy-2'-fluorocytidine-3'-phosphate
  modified_base 2: mod_base = OTHER; note = 2'-O-methyladenosine-3'-phosphate
  modified_base 3: mod_base = OTHER; note = 2'-deoxy-2'-fluorouridine-3'-phosphate
  modified_base 4: mod_base = OTHER; note = 2'-O-methyladenosine-3'-phosphate
  modified_base 5: mod_base = OTHER; note = 2'-deoxy-2'-fluoroguanosine-3'-phosphate
  modified_base 6: mod_base = OTHER; note = 2'-O-methyluridine-3'-phosphate
  modified_base 7: mod_base = OTHER; note = 2'-deoxy-2'-fluoroguanosine-3'-phosphate
  modified_base 8: mod_base = OTHER; note = 2'-O-methyladenosine-3'-phosphate
  modified_base 9: mod_base = OTHER; note = 2'-deoxy-2'-fluoroadenosine-3'-phosphate
  modified_base 10: mod_base = OTHER; note = 2'-deoxy-2'-fluoroguanosine-3'-phosphate
  modified_base 11: mod_base = OTHER; note = 2'-deoxy-2'-fluorocytidine-3'-phosphate
  modified_base 12: mod_base = OTHER; note = 2'-O-methyladenosine-3'-phosphate
  modified_base 13: mod_base = OTHER; note = 2'-deoxy-2'-fluoroadenosine-3'-phosphate
  modified_base 14: mod_base = OTHER; note = 2'-O-methyluridine-3'-phosphate
  modified_base 15: mod_base = OTHER; note = 2'-deoxy-2'-fluorocytidine-3'-phosphate
  modified_base 16: mod_base = OTHER; note = 2'-O-methyluridine-3'-phosphate
  modified_base 17: mod_base = OTHER; note = 2'-deoxy-2'-fluoroadenosine-3'-phosphate
  modified_base 18: mod_base = OTHER; note = 2'-O-methyladenosine-3'-phosphate
  modified_base 19: mod_base = OTHER; note = 2'-deoxy-2'-fluorouridine-3'-phosphate
  modified_base 20: mod_base = OTHER; note = 2'-O-methyluridine-3'-phosphate
  modified_base 21: mod_base = OTHER; note = 2'-deoxy-2'-fluoroadenosine
catagtgaagcaatctaatta

SEQ ID NO: 975 - RNA, 21 nt, synthetic construct
  source 1..21: mol_type = other RNA
  modified_base 1: mod_base = OTHER; note = 2'-deoxy-2'-fluoroadenosine-3'-phosphate
  modified_base 2: mod_base = OTHER; note = 2'-O-methyladenosine-3'-phosphate
  modified_base 3: mod_base = OTHER; note = 2'-deoxy-2'-fluorocytidine-3'-phosphate
  modified_base 4: mod_base = OTHER; note = 2'-O-methyladenosine-3'-phosphate
  modified_base 5: mod_base = OTHER; note = 2'-deoxy-2'-fluorouridine-3'-phosphate
  modified_base 6: mod_base = OTHER; note = 2'-O-methyluridine-3'-phosphate
  modified_base 7: mod_base = OTHER; note = 2'-deoxy-2'-fluoroadenosine-3'-phosphate
  modified_base 8: mod_base = OTHER; note = 2'-O-methyluridine-3'-phosphate
  modified_base 9: mod_base = OTHER; note = 2'-deoxy-2'-fluoroadenosine-3'-phosphate
  modified_base 10: mod_base = OTHER; note = 2'-deoxy-2'-fluorouridine-3'-phosphate
  modified_base 11: mod_base = OTHER; note = 2'-deoxy-2'-fluorouridine-3'-phosphate
  modified_base 12: mod_base = OTHER; note = 2'-O-methylguanosine-3'-phosphate
  modified_base 13: mod_base = OTHER; note = 2'-deoxy-2'-fluoroadenosine-3'-phosphate
  modified_base 14: mod_base = OTHER; note = 2'-O-methyladenosine-3'-phosphate
  modified_base 15: mod_base = OTHER; note = 2'-deoxy-2'-fluorouridine-3'-phosphate
  modified_base 16: mod_base = OTHER; note = 2'-O-methyladenosine-3'-phosphate
  modified_base 17: mod_base = OTHER; note = 2'-deoxy-2'-fluorouridine-3'-phosphate
  modified_base 18: mod_base = OTHER; note = 2'-O-methyluridine-3'-phosphate
  modified_base 19: mod_base = OTHER; note = 2'-deoxy-2'-fluorocytidine-3'-phosphate
  modified_base 20: mod_base = OTHER; note = 2'-O-methyluridine-3'-phosphate
  modified_base 21: mod_base = OTHER; note = 2'-deoxy-2'-fluorouridine
aacattatattgaatattctt

SEQ ID NO: 976 - RNA, 21 nt, synthetic construct
  source 1..21: mol_type = other RNA
  modified_base 1: mod_base = OTHER; note = 2'-deoxy-2'-fluoroguanosine-3'-phosphate
  modified_base 2: mod_base = OTHER; note = 2'-O-methylcytidine-3'-phosphate
  modified_base 3: mod_base = OTHER; note = 2'-deoxy-2'-fluoroadenosine-3'-phosphate
  modified_base 4: mod_base = OTHER; note = 2'-O-methyladenosine-3'-phosphate
  modified_base 5: mod_base = OTHER; note = 2'-deoxy-2'-fluorouridine-3'-phosphate
  modified_base 6: mod_base = OTHER; note = 2'-O-methylcytidine-3'-phosphate
  modified_base 7: mod_base = OTHER; note = 2'-deoxy-2'-fluorocytidine-3'-phosphate
  modified_base 8: mod_base = OTHER; note = 2'-O-methylcytidine-3'-phosphate
  modified_base 9: mod_base = OTHER; note = 2'-deoxy-2'-fluoroguanosine-3'-phosphate
  modified_base 10: mod_base = OTHER; note = 2'-deoxy-2'-fluoroguanosine-3'-phosphate
  modified_base 11: mod_base = OTHER; note = 2'-deoxy-2'-fluoroadenosine-3'-phosphate
  modified_base 12: mod_base = OTHER; note = 2'-O-methyladenosine-3'-phosphate
  modified_base 13: mod_base = OTHER; note = 2'-deoxy-2'-fluoroadenosine-3'-phosphate
  modified_base 14: mod_base = OTHER; note = 2'-O-methyladenosine-3'-phosphate
  modified_base 15: mod_base = OTHER; note = 2'-deoxy-2'-fluorocytidine-3'-phosphate
  modified_base 16: mod_base = OTHER; note = 2'-O-methyladenosine-3'-phosphate
  modified_base 17: mod_base = OTHER; note = 2'-deoxy-2'-fluoroadenosine-3'-phosphate
  modified_base 18: mod_base = OTHER; note = 2'-O-methyladenosine-3'-phosphate
  modified_base 19: mod_base = OTHER; note = 2'-deoxy-2'-fluoroguanosine-3'-phosphate
  modified_base 20: mod_base = OTHER; note = 2'-O-methyladenosine-3'-phosphate
  modified_base 21: mod_base = OTHER; note = 2'-deoxy-2'-fluorouridine
gcaatcccggaaaacaaagat

SEQ ID NO: 977 - RNA, 21 nt, synthetic construct
  source 1..21: mol_type = other RNA
  modified_base 1: mod_base = OTHER; note = 2'-deoxy-2'-fluoroguanosine-3'-phosphate
  modified_base 2: mod_base = OTHER; note = 2'-O-methylguanosine-3'-phosphate
  modified_base 3: mod_base = OTHER; note = 2'-deoxy-2'-fluorouridine-3'-phosphate
  modified_base 4: mod_base = OTHER; note = 2'-O-methyladenosine-3'-phosphate
  modified_base 5: mod_base = OTHER; note = 2'-deoxy-2'-fluoroguanosine-3'-phosphate
  modified_base 6: mod_base = OTHER; note = 2'-O-methyluridine-3'-phosphate
  modified_base 7: mod_base = OTHER; note = 2'-deoxy-2'-fluorocytidine-3'-phosphate
  modified_base 8: mod_base = OTHER; note = 2'-O-methylcytidine-3'-phosphate
  modified_base 9: mod_base = OTHER; note = 2'-deoxy-2'-fluoroadenosine-3'-phosphate
  modified_base 10: mod_base = OTHER; note = 2'-deoxy-2'-fluorouridine-3'-phosphate
  modified_base 11: mod_base = OTHER; note = 2'-deoxy-2'-fluoroguanosine-3'-phosphate
  modified_base 12: mod_base = OTHER; note = 2'-O-methylguanosine-3'-phosphate
  modified_base 13: mod_base = OTHER; note = 2'-deoxy-2'-fluoroadenosine-3'-phosphate
  modified_base 14: mod_base = OTHER; note = 2'-O-methylcytidine-3'-phosphate
  modified_base 15: mod_base = OTHER; note = 2'-deoxy-2'-fluoroadenosine-3'-phosphate
  modified_base 16: mod_base = OTHER; note = 2'-O-methyluridine-3'-phosphate
  modified_base 17: mod_base = OTHER; note = 2'-deoxy-2'-fluorouridine-3'-phosphate
  modified_base 18: mod_base = OTHER; note = 2'-O-methyladenosine-3'-phosphate
  modified_base 19: mod_base = OTHER; note = 2'-deoxy-2'-fluoroadenosine-3'-phosphate
  modified_base 20: mod_base = OTHER; note = 2'-O-methyluridine-3'-phosphate
  modified_base 21: mod_base = OTHER; note = 2'-deoxy-2'-fluorouridine
ggtagtccatggacattaatt

SEQ ID NO: 978 - RNA, 21 nt, synthetic construct
  source 1..21: mol_type = other RNA
  modified_base 1: mod_base = OTHER; note = 2'-deoxy-2'-fluoroadenosine-3'-phosphate
  modified_base 2: mod_base = OTHER; note = 2'-O-methyluridine-3'-phosphate
  modified_base 3: mod_base = OTHER; note = 2'-deoxy-2'-fluorocytidine-3'-phosphate
  modified_base 4: mod_base = OTHER; note = 2'-O-methylguanosine-3'-phosphate
  modified_base 5: mod_base = OTHER; note = 2'-deoxy-2'-fluoroadenosine-3'-phosphate
  modified_base 6: mod_base = OTHER; note = 2'-O-methyladenosine-3'-phosphate
  modified_base 7: mod_base = OTHER; note = 2'-deoxy-2'-fluorouridine-3'-phosphate
  modified_base 8: mod_base = OTHER; note = 2'-O-methyladenosine-3'-phosphate
  modified_base 9: mod_base = OTHER; note = 2'-deoxy-2'-fluoroguanosine-3'-phosphate
  modified_base 10: mod_base = OTHER; note = 2'-deoxy-2'-fluoroadenosine-3'-phosphate
  modified_base 11: mod_base = OTHER; note = 2'-deoxy-2'-fluorouridine-3'-phosphate
  modified_base 12: mod_base = OTHER; note = 2'-O-methylguanosine-3'-phosphate
  modified_base 13: mod_base = OTHER; note = 2'-deoxy-2'-fluoroguanosine-3'-phosphate
  modified_base 14: mod_base = OTHER; note = 2'-O-methyladenosine-3'-phosphate
  modified_base 15: mod_base = OTHER; note = 2'-deoxy-2'-fluorouridine-3'-phosphate
  modified_base 16: mod_base = OTHER; note = 2'-O-methylcytidine-3'-phosphate
  modified_base 17: mod_base = OTHER; note = 2'-deoxy-2'-fluoroadenosine-3'-phosphate
  modified_base 18: mod_base = OTHER; note = 2'-O-methylcytidine-3'-phosphate
  modified_base 19: mod_base = OTHER; note = 2'-deoxy-2'-fluoroadenosine-3'-phosphate
  modified_base 20: mod_base = OTHER; note = 2'-O-methyladenosine-3'-phosphate
  modified_base 21: mod_base = OTHER; note = 2'-deoxy-2'-fluoroadenosine
atcgaatagatggatcacaaa

SEQ ID NO: 979 - RNA, 21 nt, synthetic construct
  source 1..21: mol_type = other RNA
  modified_base 1: mod_base = OTHER; note = 2'-deoxy-2'-fluorocytidine-3'-phosphate
  modified_base 2: mod_base = OTHER; note = 2'-O-methylcytidine-3'-phosphate
  modified_base 3: mod_base = OTHER; note = 2'-deoxy-2'-fluorouridine-3'-phosphate
  modified_base 4: mod_base = OTHER; note = 2'-O-methyladenosine-3'-phosphate
  modified_base 5: mod_base = OTHER; note = 2'-deoxy-2'-fluoroguanosine-3'-phosphate
  modified_base 6: mod_base = OTHER; note = 2'-O-methyladenosine-3'-phosphate
  modified_base 7: mod_base = OTHER; note = 2'-deoxy-2'-fluoroguanosine-3'-phosphate
  modified_base 8: mod_base = OTHER; note = 2'-O-methyladenosine-3'-phosphate
  modified_base 9: mod_base = OTHER; note = 2'-deoxy-2'-fluoroadenosine-3'-phosphate
  modified_base 10: mod_base = OTHER; note = 2'-deoxy-2'-fluoroguanosine-3'-phosphate
  modified_base 11: mod_base = OTHER; note = 2'-deoxy-2'-fluoroadenosine-3'-phosphate
  modified_base 12: mod_base = OTHER; note = 2'-O-methyluridine-3'-phosphate
  modified_base 13: mod_base = OTHER; note = 2'-deoxy-2'-fluoroadenosine-3'-phosphate
  modified_base 14: mod_base = OTHER; note = 2'-O-methyluridine-3'-phosphate
  modified_base 15: mod_base = OTHER; note = 2'-deoxy-2'-fluoroadenosine-3'-phosphate
  modified_base 16: mod_base = OTHER; note = 2'-O-methylcytidine-3'-phosphate
  modified_base 17: mod_base = OTHER; note = 2'-deoxy-2'-fluorouridine-3'-phosphate
  modified_base 18: mod_base = OTHER; note = 2'-O-methylcytidine-3'-phosphate
  modified_base 19: mod_base = OTHER; note = 2'-deoxy-2'-fluorocytidine-3'-phosphate
  modified_base 20: mod_base = OTHER; note = 2'-O-methyladenosine-3'-phosphate
  modified_base 21: mod_base = OTHER; note = 2'-deoxy-2'-fluorouridine
cctagagaagatatactccat

SEQ ID NO: 980 - RNA, 21 nt, synthetic construct
  source 1..21: mol_type = other RNA
  modified_base 1: mod_base = OTHER; note = 2'-deoxy-2'-fluoroguanosine-3'-phosphate
  modified_base 2: mod_base = OTHER; note = 2'-O-methyluridine-3'-phosphate
  modified_base 3: mod_base = OTHER; note = 2'-deoxy-2'-fluorouridine-3'-phosphate
  modified_base 4: mod_base = OTHER; note = 2'-O-methylguanosine-3'-phosphate
  modified_base 5: mod_base = OTHER; note = 2'-deoxy-2'-fluoroguanosine-3'-phosphate
  modified_base 6: mod_base = OTHER; note = 2'-O-methyladenosine-3'-phosphate
  modified_base 7: mod_base = OTHER; note = 2'-deoxy-2'-fluoroadenosine-3'-phosphate
  modified_base 8: mod_base = OTHER; note = 2'-O-methylguanosine-3'-phosphate
  modified_base 9: mod_base = OTHER; note = 2'-deoxy-2'-fluoroadenosine-3'-phosphate
  modified_base 10: mod_base = OTHER; note = 2'-deoxy-2'-fluorocytidine-3'-phosphate
  modified_base 11: mod_base = OTHER; note = 2'-deoxy-2'-fluorouridine-3'-phosphate
  modified_base 12: mod_base = OTHER; note = 2'-O-methylguanosine-3'-phosphate
  modified_base 13: mod_base = OTHER; note = 2'-deoxy-2'-fluoroguanosine-3'-phosphate
  modified_base 14: mod_base = OTHER; note = 2'-O-methyladenosine-3'-phosphate
  modified_base 15: mod_base = OTHER; note = 2'-deoxy-2'-fluoroadenosine-3'-phosphate
  modified_base 16: mod_base = OTHER; note = 2'-O-methyladenosine-3'-phosphate
  modified_base 17: mod_base = OTHER; note = 2'-deoxy-2'-fluoroguanosine-3'-phosphate
  modified_base 18: mod_base = OTHER; note = 2'-O-methyladenosine-3'-phosphate
  modified_base 19: mod_base = OTHER; note = 2'-deoxy-2'-fluorocytidine-3'-phosphate
  modified_base 20: mod_base = OTHER; note = 2'-O-methyladenosine-3'-phosphate
  modified_base 21: mod_base = OTHER; note = 2'-deoxy-2'-fluoroadenosine
gttggaagactggaaagacaa

SEQ ID NO: 981 - RNA, 21 nt, synthetic construct
  source 1..21: mol_type = other RNA
  modified_base 1: mod_base = OTHER; note = 2'-deoxy-2'-fluoroadenosine-3'-phosphate
  modified_base 2: mod_base = OTHER; note = 2'-O-methylcytidine-3'-phosphate
  modified_base 3: mod_base = OTHER; note = 2'-deoxy-2'-fluoroadenosine-3'-phosphate
  modified_base 4: mod_base = OTHER; note = 2'-O-methyluridine-3'-phosphate
  modified_base 5: mod_base = OTHER; note = 2'-deoxy-2'-fluorouridine-3'-phosphate
  modified_base 6: mod_base = OTHER; note = 2'-O-methyladenosine-3'-phosphate
  modified_base 7: mod_base = OTHER; note = 2'-deoxy-2'-fluorouridine-3'-phosphate
  modified_base 8: mod_base = OTHER; note = 2'-O-methyladenosine-3'-phosphate
  modified_base 9: mod_base = OTHER; note = 2'-deoxy-2'-fluorouridine-3'-phosphate
  modified_base 10: mod_base = OTHER; note = 2'-deoxy-2'-fluorouridine-3'-phosphate
  modified_base 11: mod_base = OTHER; note = 2'-deoxy-2'-fluoroguanosine-3'-phosphate
  modified_base 12: mod_base = OTHER; note = 2'-O-methyladenosine-3'-phosphate
  modified_base 13: mod_base = OTHER; note = 2'-deoxy-2'-fluoroadenosine-3'-phosphate
  modified_base 14: mod_base = OTHER; note = 2'-O-methyluridine-3'-phosphate
  modified_base 15: mod_base = OTHER; note = 2'-deoxy-2'-fluoroadenosine-3'-phosphate
  modified_base 16: mod_base = OTHER; note = 2'-O-methyluridine-3'-phosphate
  modified_base 17: mod_base = OTHER; note = 2'-deoxy-2'-fluorouridine-3'-phosphate
  modified_base 18: mod_base = OTHER; note = 2'-O-methylcytidine-3'-phosphate
  modified_base 19: mod_base = OTHER; note = 2'-deoxy-2'-fluorouridine-3'-phosphate
  modified_base 20: mod_base = OTHER; note = 2'-O-methyluridine-3'-phosphate
  modified_base 21: mod_base = OTHER; note = 2'-deoxy-2'-fluorouridine
acattatattgaatattcttt

SEQ ID NO: 982 - RNA, 21 nt, synthetic construct
  source 1..21: mol_type = other RNA
  modified_base 1: mod_base = OTHER; note = 2'-deoxy-2'-fluorocytidine-3'-phosphate
  modified_base 2: mod_base = OTHER; note = 2'-O-methyladenosine-3'-phosphate
  modified_base 3: mod_base = OTHER; note = 2'-deoxy-2'-fluoroadenosine-3'-phosphate
  modified_base 4: mod_base = OTHER; note = 2'-O-methyluridine-3'-phosphate
  modified_base 5: mod_base = OTHER; note = 2'-deoxy-2'-fluorocytidine-3'-phosphate
  modified_base 6: mod_base = OTHER; note = 2'-O-methylcytidine-3'-phosphate
  modified_base 7: mod_base = OTHER; note = 2'-deoxy-2'-fluorocytidine-3'-phosphate
  modified_base 8: mod_base = OTHER; note = 2'-O-methylguanosine-3'-phosphate
  modified_base 9: mod_base = OTHER; note = 2'-deoxy-2'-fluoroguanosine-3'-phosphate
  modified_base 10: mod_base = OTHER; note = 2'-deoxy-2'-fluoroadenosine-3'-phosphate
  modified_base 11: mod_base = OTHER; note = 2'-deoxy-2'-fluoroadenosine-3'-phosphate
  modified_base 12: mod_base = OTHER; note = 2'-O-methyladenosine-3'-phosphate
  modified_base 13: mod_base = OTHER; note = 2'-deoxy-2'-fluoroadenosine-3'-phosphate
  modified_base 14: mod_base = OTHER; note = 2'-O-methylcytidine-3'-phosphate
  modified_base 15: mod_base = OTHER; note = 2'-deoxy-2'-fluoroadenosine-3'-phosphate
  modified_base 16: mod_base = OTHER; note = 2'-O-methyladenosine-3'-phosphate
  modified_base 17: mod_base = OTHER; note = 2'-deoxy-2'-fluoroadenosine-3'-phosphate
  modified_base 18: mod_base = OTHER; note = 2'-O-methylguanosine-3'-phosphate
  modified_base 19: mod_base = OTHER; note = 2'-deoxy-2'-fluoroadenosine-3'-phosphate
  modified_base 20: mod_base = OTHER; note = 2'-O-methyluridine-3'-phosphate
  modified_base 21: mod_base = OTHER; note = 2'-deoxy-2'-fluorouridine
caatcccggaaaacaaagatt

SEQ ID NO: 983 - RNA, 21 nt, synthetic construct
  source 1..21: mol_type = other RNA
  modified_base 1: mod_base = OTHER; note = 2'-deoxy-2'-fluorocytidine-3'-phosphate
  modified_base 2: mod_base = OTHER; note = 2'-O-methyluridine-3'-phosphate
  modified_base 3: mod_base = OTHER; note = 2'-deoxy-2'-fluoroadenosine-3'-phosphate
  modified_base 4: mod_base = OTHER; note = 2'-O-methylcytidine-3'-phosphate
  modified_base 5: mod_base = OTHER; note = 2'-deoxy-2'-fluorouridine-3'-phosphate
  modified_base 6: mod_base = OTHER; note = 2'-O-methyluridine-3'-phosphate
  modified_base 7: mod_base = OTHER; note = 2'-deoxy-2'-fluoroguanosine-3'-phosphate
  modified_base 8: mod_base = OTHER; note = 2'-O-methylguanosine-3'-phosphate
  modified_base 9: mod_base = OTHER; note = 2'-deoxy-2'-fluoroguanosine-3'-phosphate
  modified_base 10: mod_base = OTHER; note = 2'-deoxy-2'-fluoroadenosine-3'-phosphate
  modified_base 11: mod_base = OTHER; note = 2'-deoxy-2'-fluorouridine-3'-phosphate
  modified_base 12: mod_base = OTHER; note = 2'-O-methylcytidine-3'-phosphate
  modified_base 13: mod_base = OTHER; note = 2'-deoxy-2'-fluoroadenosine-3'-phosphate
  modified_base 14: mod_base = OTHER; note = 2'-O-methylcytidine-3'-phosphate
  modified_base 15: mod_base = OTHER; note = 2'-deoxy-2'-fluoroadenosine-3'-phosphate
  modified_base 16: mod_base = OTHER; note = 2'-O-methyladenosine-3'-phosphate
  modified_base 17: mod_base = OTHER; note = 2'-deoxy-2'-fluoroadenosine-3'-phosphate
  modified_base 18: mod_base = OTHER; note = 2'-O-methylguanosine-3'-phosphate
  modified_base 19: mod_base = OTHER; note = 2'-deoxy-2'-fluorocytidine-3'-phosphate
  modified_base 20: mod_base = OTHER; note = 2'-O-methyladenosine-3'-phosphate
  modified_base 21: mod_base = OTHER; note = 2'-deoxy-2'-fluoroadenosine
ctacttgggatcacaaagcaa

SEQ ID NO: 984 - RNA, 21 nt, synthetic construct
  source 1..21: mol_type = other RNA
  modified_base 1: mod_base = OTHER; note = 2'-deoxy-2'-fluoroadenosine-3'-phosphate
  modified_base 2: mod_base = OTHER; note = 2'-O-methylcytidine-3'-phosphate
  modified_base 3: mod_base = OTHER; note = 2'-deoxy-2'-fluoroadenosine-3'-phosphate
  modified_base 4: mod_base = OTHER; note = 2'-O-methyladenosine-3'-phosphate
  modified_base 5: mod_base = OTHER; note = 2'-deoxy-2'-fluorocytidine-3'-phosphate
  modified_base 6: mod_base = OTHER; note = 2'-O-methylcytidine-3'-phosphate
  modified_base 7: mod_base = OTHER; note = 2'-deoxy-2'-fluorouridine-3'-phosphate
  modified_base 8: mod_base = OTHER; note = 2'-O-methyladenosine-3'-phosphate
  modified_base 9: mod_base = OTHER; note = 2'-deoxy-2'-fluoroadenosine-3'-phosphate
  modified_base 10: mod_base = OTHER; note = 2'-deoxy-2'-fluoroadenosine-3'-phosphate
  modified_base 11: mod_base = OTHER; note = 2'-deoxy-2'-fluorouridine-3'-phosphate
  modified_base 12: mod_base = OTHER; note = 2'-O-methylguanosine-3'-phosphate
  modified_base 13: mod_base = OTHER; note = 2'-deoxy-2'-fluoroguanosine-3'-phosphate
  modified_base 14: mod_base = OTHER; note = 2'-O-methyluridine-3'-phosphate
  modified_base 15: mod_base = OTHER; note = 2'-deoxy-2'-fluoroadenosine-3'-phosphate
  modified_base 16: mod_base = OTHER; note = 2'-O-methyladenosine-3'-phosphate
  modified_base 17: mod_base = OTHER; note = 2'-deoxy-2'-fluoroadenosine-3'-phosphate
  modified_base 18: mod_base = OTHER; note = 2'-O-methyluridine-3'-phosphate
  modified_base 19: mod_base = OTHER; note = 2'-deoxy-2'-fluoroadenosine-3'-phosphate
  modified_base 20: mod_base = OTHER; note = 2'-O-methyluridine-3'-phosphate
  modified_base 21: mod_base = OTHER; note = 2'-deoxy-2'-fluoroadenosine
acaacctaaatggtaaatata

SEQ ID NO: 985 - RNA, 21 nt, synthetic construct
  source 1..21: mol_type = other RNA
  modified_base 1: mod_base = OTHER; note = 2'-deoxy-2'-fluoroadenosine-3'-phosphate
  modified_base 2: mod_base = OTHER; note = 2'-O-methyluridine-3'-phosphate
  modified_base 3: mod_base = OTHER; note = 2'-deoxy-2'-fluorocytidine-3'-phosphate
  modified_base 4: mod_base = OTHER; note = 2'-O-methylcytidine-3'-phosphate
  modified_base 5: mod_base = OTHER; note = 2'-deoxy-2'-fluoroadenosine-3'-phosphate
  modified_base 6: mod_base = OTHER; note = 2'-O-methyluridine-3'-phosphate
  modified_base 7: mod_base = OTHER; note = 2'-deoxy-2'-fluorocytidine-3'-phosphate
  modified_base 8: mod_base = OTHER; note = 2'-O-methylcytidine-3'-phosphate
  modified_base 9: mod_base = OTHER; note = 2'-deoxy-2'-fluoroadenosine-3'-phosphate
  modified_base 10: mod_base = OTHER; note = 2'-deoxy-2'-fluoroadenosine-3'-phosphate
  modified_base 11: mod_base = OTHER; note = 2'-deoxy-2'-fluorocytidine-3'-phosphate
  modified_base 12: mod_base = OTHER; note = 2'-O-methyladenosine-3'-phosphate
  modified_base 13: mod_base = OTHER; note = 2'-deoxy-2'-fluoroguanosine-3'-phosphate
  modified_base 14: mod_base = OTHER; note = 2'-O-methyladenosine-3'-phosphate
  modified_base 15: mod_base = OTHER; note = 2'-deoxy-2'-fluorouridine-3'-phosphate
  modified_base 16: mod_base = OTHER; note = 2'-O-methyluridine-3'-phosphate
  modified_base 17: mod_base = OTHER; note = 2'-deoxy-2'-fluorocytidine-3'-phosphate
  modified_base 18: mod_base = OTHER; note = 2'-O-methyladenosine-3'-phosphate
  modified_base 19: mod_base = OTHER; note = 2'-deoxy-2'-fluoroguanosine-3'-phosphate
  modified_base 20: mod_base = OTHER; note = 2'-O-methyladenosine-3'-phosphate
  modified_base 21: mod_base = OTHER; note = 2'-deoxy-2'-fluoroadenosine
atccatccaacagattcagaa

SEQ ID NO: 986 - RNA, 21 nt, synthetic construct
  source 1..21: mol_type = other RNA
  modified_base 1: mod_base = OTHER; note = 2'-deoxy-2'-fluoroadenosine-3'-phosphate
  modified_base 2: mod_base = OTHER; note = 2'-O-methyladenosine-3'-phosphate
  modified_base 3: mod_base = OTHER; note = 2'-deoxy-2'-fluorocytidine-3'-phosphate
  modified_base 4: mod_base = OTHER; note = 2'-O-methyluridine-3'-phosphate
  modified_base 5: mod_base = OTHER; note = 2'-deoxy-2'-fluoroguanosine-3'-phosphate
  modified_base 6: mod_base = OTHER; note = 2'-O-methyladenosine-3'-phosphate
  modified_base 7: mod_base = OTHER; note = 2'-deoxy-2'-fluoroguanosine-3'-phosphate
  modified_base 8: mod_base = OTHER; note = 2'-O-methylguanosine-3'-phosphate
  modified_base 9: mod_base = OTHER; note = 2'-deoxy-2'-fluorocytidine-3'-phosphate
  modified_base 10: mod_base = OTHER; note = 2'-deoxy-2'-fluoroadenosine-3'-phosphate
  modified_base 11: mod_base = OTHER; note = 2'-deoxy-2'-fluoroadenosine-3'-phosphate
  modified_base 12: mod_base = OTHER; note = 2'-O-methyladenosine-3'-phosphate
  modified_base 13: mod_base = OTHER; note = 2'-deoxy-2'-fluorouridine-3'-phosphate
  modified_base 14: mod_base = OTHER; note = 2'-O-methyluridine-3'-phosphate
  modified_base 15: mod_base = OTHER; note = 2'-deoxy-2'-fluorouridine-3'-phosphate
  modified_base 16: mod_base = OTHER; note = 2'-O-methyladenosine-3'-phosphate
  modified_base 17: mod_base = OTHER; note = 2'-deoxy-2'-fluoroadenosine-3'-phosphate
  modified_base 18: mod_base = OTHER; note = 2'-O-methyladenosine-3'-phosphate
  modified_base 19: mod_base = OTHER; note = 2'-deoxy-2'-fluoroadenosine-3'-phosphate
  modified_base 20: mod_base = OTHER; note = 2'-O-methylguanosine-3'-phosphate
  modified_base 21: mod_base = OTHER; note = 2'-deoxy-2'-fluoroadenosine
aactgaggcaaatttaaaaga

SEQ ID NO: 987 - RNA, 21 nt, synthetic construct
  source 1..21: mol_type = other RNA
  modified_base 1: mod_base = OTHER; note = 2'-deoxy-2'-fluoroadenosine-3'-phosphate
  modified_base 2: mod_base = OTHER; note = 2'-O-methylguanosine-3'-phosphate
  modified_base 3: mod_base = OTHER; note = 2'-deoxy-2'-fluoroadenosine-3'-phosphate
  modified_base 4: mod_base = OTHER; note = 2'-O-methylguanosine-3'-phosphate
  modified_base 5: mod_base = OTHER; note = 2'-deoxy-2'-fluorouridine-3'-phosphate
  modified_base 6: mod_base = OTHER; note = 2'-O-methyladenosine-3'-phosphate
  modified_base 7: mod_base = OTHER; note = 2'-deoxy-2'-fluorouridine-3'-phosphate
  modified_base 8: mod_base = OTHER; note = 2'-O-methylguanosine-3'-phosphate
  modified_base 9: mod_base = OTHER; note = 2'-deoxy-2'-fluorouridine-3'-phosphate
  modified_base 10: mod_base = OTHER; note = 2'-deoxy-2'-fluoroguanosine-3'-phosphate
  modified_base 11: mod_base = OTHER; note = 2'-deoxy-2'-fluorouridine-3'-phosphate
  modified_base 12: mod_base = OTHER; note = 2'-O-methyladenosine-3'-phosphate
  modified_base 13: mod_base = OTHER; note = 2'-deoxy-2'-fluoroadenosine-3'-phosphate
  modified_base 14: mod_base = OTHER; note = 2'-O-methyladenosine-3'-phosphate
  modified_base 15: mod_base = OTHER; note = 2'-deoxy-2'-fluoroadenosine-3'-phosphate
  modified_base 16: mod_base = OTHER; note = 2'-O-methyladenosine-3'-phosphate
  modified_base 17: mod_base = OTHER; note = 2'-deoxy-2'-fluorouridine-3'-phosphate
  modified_base 18: mod_base = OTHER; note = 2'-O-methylcytidine-3'-phosphate
  modified_base 19: mod_base = OTHER; note = 2'-deoxy-2'-fluorouridine-3'-phosphate
  modified_base 20: mod_base = OTHER; note = 2'-O-methylguanosine-3'-phosphate
  modified_base 21: mod_base = OTHER; note = 2'-deoxy-2'-fluorouridine
agagtatgtgtaaaaatctgt

SEQ ID NO: 988 - RNA, 21 nt, synthetic construct
  source 1..21: mol_type = other RNA
  modified_base 1: mod_base = OTHER; note = 2'-deoxy-2'-fluoroadenosine-3'-phosphate
  modified_base 2: mod_base = OTHER; note = 2'-O-methyladenosine-3'-phosphate
  modified_base 3: mod_base = OTHER; note = 2'-deoxy-2'-fluorouridine-3'-phosphate
  modified_base 4: mod_base = OTHER; note = 2'-O-methylcytidine-3'-phosphate
  modified_base 5: mod_base = OTHER; note = 2'-deoxy-2'-fluorocytidine-3'-phosphate
  modified_base 6: mod_base = OTHER; note = 2'-O-methylcytidine-3'-phosphate
  modified_base 7: mod_base = OTHER; note = 2'-deoxy-2'-fluoroguanosine-3'-phosphate
  modified_base 8: mod_base = OTHER; note = 2'-O-methylguanosine-3'-phosphate
  modified_base 9: mod_base = OTHER; note = 2'-deoxy-2'-fluoroadenosine-3'-phosphate
  modified_base 10: mod_base = OTHER; note = 2'-deoxy-2'-fluoroadenosine-3'-phosphate
  modified_base 11: mod_base = OTHER; note = 2'-deoxy-2'-fluoroadenosine-3'-phosphate
  modified_base 12: mod_base = OTHER; note = 2'-O-methyladenosine-3'-phosphate
  modified_base 13: mod_base = OTHER; note = 2'-deoxy-2'-fluorocytidine-3'-phosphate
  modified_base 14: mod_base = OTHER; note = 2'-O-methyladenosine-3'-phosphate
  modified_base 15: mod_base = OTHER; note = 2'-deoxy-2'-fluoroadenosine-3'-phosphate
  modified_base 16: mod_base = OTHER; note = 2'-O-methyladenosine-3'-phosphate
  modified_base 17: mod_base = OTHER; note = 2'-deoxy-2'-fluoroguanosine-3'-phosphate
  modified_base 18: mod_base = OTHER; note = 2'-O-methyladenosine-3'-phosphate
  modified_base 19: mod_base = OTHER; note = 2'-deoxy-2'-fluorouridine-3'-phosphate
  modified_base 20: mod_base = OTHER; note = 2'-O-methyluridine-3'-phosphate
  modified_base 21: mod_base = OTHER; note = 2'-deoxy-2'-fluorouridine
aatcccggaaaacaaagattt

SEQ ID NO: 989 - RNA, 21 nt, synthetic construct
  source 1..21: mol_type = other RNA
  modified_base 1: mod_base = OTHER; note = 2'-deoxy-2'-fluorouridine-3'-phosphate
  modified_base 2: mod_base = OTHER; note = 2'-O-methyladenosine-3'-phosphate
  modified_base 3: mod_base = OTHER; note = 2'-deoxy-2'-fluorocytidine-3'-phosphate
  modified_base 4: mod_base = OTHER; note = 2'-O-methyluridine-3'-phosphate
  modified_base 5: mod_base = OTHER; note = 2'-deoxy-2'-fluorouridine-3'-phosphate
  modified_base 6: mod_base = OTHER; note = 2'-O-methylguanosine-3'-phosphate
  modified_base 7: mod_base = OTHER; note = 2'-deoxy-2'-fluoroguanosine-3'-phosphate
  modified_base 8: mod_base = OTHER; note = 2'-O-methylguanosine-3'-phosphate
  modified_base 9: mod_base = OTHER; note = 2'-deoxy-2'-fluoroadenosine-3'-phosphate
  modified_base 10: mod_base = OTHER; note = 2'-deoxy-2'-fluorouridine-3'-phosphate
  modified_base 11: mod_base = OTHER; note = 2'-deoxy-2'-fluorocytidine-3'-phosphate
  modified_base 12: mod_base = OTHER; note = 2'-O-methyladenosine-3'-phosphate
  modified_base 13: mod_base = OTHER; note = 2'-deoxy-2'-fluorocytidine-3'-phosphate
  modified_base 14: mod_base = OTHER; note = 2'-O-methyladenosine-3'-phosphate
  modified_base 15: mod_base = OTHER; note = 2'-deoxy-2'-fluoroadenosine-3'-phosphate
  modified_base 16: mod_base = OTHER; note = 2'-O-methyladenosine-3'-phosphate
  modified_base 17: mod_base = OTHER; note = 2'-deoxy-2'-fluoroguanosine-3'-phosphate
  modified_base 18: mod_base = OTHER; note = 2'-O-methylcytidine-3'-phosphate
  modified_base 19: mod_base = OTHER; note = 2'-deoxy-2'-fluoroadenosine-3'-phosphate
  modified_base 20: mod_base = OTHER; note = 2'-O-methyladenosine-3'-phosphate
  modified_base 21: mod_base = OTHER; note = 2'-deoxy-2'-fluoroadenosine
tacttgggatcacaaagcaaa

SEQ ID NO: 990 - RNA, 21 nt, synthetic construct
  source 1..21: mol_type = other RNA
  modified_base 1: mod_base = OTHER; note = 2'-deoxy-2'-fluorocytidine-3'-phosphate
  modified_base 2: mod_base = OTHER; note = 2'-O-methyladenosine-3'-phosphate
  modified_base 3: mod_base = OTHER; note = 2'-deoxy-2'-fluoroadenosine-3'-phosphate
  modified_base 4: mod_base = OTHER; note = 2'-O-methylcytidine-3'-phosphate
  modified_base 5: mod_base = OTHER; note = 2'-deoxy-2'-fluorocytidine-3'-phosphate
  modified_base 6: mod_base = OTHER; note = 2'-O-methyluridine-3'-phosphate
  modified_base 7: mod_base = OTHER; note = 2'-deoxy-2'-fluoroadenosine-3'-phosphate
  modified_base 8: mod_base = OTHER; note = 2'-O-methyladenosine-3'-phosphate
  modified_base 9: mod_base = OTHER; note = 2'-deoxy-2'-fluoroadenosine-3'-phosphate
  modified_base 10: mod_base = OTHER; note = 2'-deoxy-2'-fluorouridine-3'-phosphate
  modified_base 11: mod_base = OTHER; note = 2'-deoxy-2'-fluoroguanosine-3'-phosphate
  modified_base 12: mod_base = OTHER; note = 2'-O-methylguanosine-3'-phosphate
  modified_base 13: mod_base = OTHER; note = 2'-deoxy-2'-fluorouridine-3'-phosphate
  modified_base 14: mod_base = OTHER; note = 2'-O-methyladenosine-3'-phosphate
  modified_base 15: mod_base = OTHER; note = 2'-deoxy-2'-fluoroadenosine-3'-phosphate
  modified_base 16: mod_base = OTHER; note = 2'-O-methyladenosine-3'-phosphate
  modified_base 17: mod_base = OTHER; note = 2'-deoxy-2'-fluorouridine-3'-phosphate
  modified_base 18: mod_base = OTHER; note = 2'-O-methyladenosine-3'-phosphate
  modified_base 19: mod_base = OTHER; note = 2'-deoxy-2'-fluorouridine-3'-phosphate
  modified_base 20: mod_base = OTHER; note = 2'-O-methyladenosine-3'-phosphate
  modified_base 21: mod_base = OTHER; note = 2'-deoxy-2'-fluoroadenosine
caacctaaatggtaaatataa

SEQ ID NO: 991 - RNA, 21 nt, synthetic construct
  source 1..21: mol_type = other RNA
  modified_base 1: mod_base = OTHER; note = 2'-deoxy-2'-fluorouridine-3'-phosphate
  modified_base 2: mod_base = OTHER; note = 2'-O-methyluridine-3'-phosphate
  modified_base 3: mod_base = OTHER; note = 2'-deoxy-2'-fluoroguanosine-3'-phosphate
  modified_base 4: mod_base = OTHER; note = 2'-O-methyladenosine-3'-phosphate
  modified_base 5: mod_base = OTHER; note = 2'-deoxy-2'-fluoroadenosine-3'-phosphate
  modified_base 6: mod_base = OTHER; note = 2'-O-methyluridine-3'-phosphate
  modified_base 7: mod_base = OTHER; note = 2'-deoxy-2'-fluoroguanosine-3'-phosphate
  modified_base 8: mod_base = OTHER; note = 2'-O-methyladenosine-3'-phosphate
  modified_base 9: mod_base = OTHER; note = 2'-deoxy-2'-fluoroadenosine-3'-phosphate
  modified_base 10: mod_base = OTHER; note = 2'-deoxy-2'-fluorocytidine-3'-phosphate
  modified_base 11: mod_base = OTHER; note = 2'-deoxy-2'-fluorouridine-3'-phosphate
  modified_base 12: mod_base = OTHER; note = 2'-O-methylguanosine-3'-phosphate
  modified_base 13: mod_base = OTHER; note = 2'-deoxy-2'-fluoroadenosine-3'-phosphate
  modified_base 14: mod_base = OTHER; note = 2'-O-methylguanosine-3'-phosphate
  modified_base 15: mod_base = OTHER; note = 2'-deoxy-2'-fluoroguanosine-3'-phosphate
  modified_base 16: mod_base = OTHER; note = 2'-O-methylcytidine-3'-phosphate
  modified_base 17: mod_base = OTHER; note = 2'-deoxy-2'-fluoroadenosine-3'-phosphate
  modified_base 18: mod_base = OTHER; note = 2'-O-methyladenosine-3'-phosphate
  modified_base 19: mod_base = OTHER; note = 2'-deoxy-2'-fluoroadenosine-3'-phosphate
  modified_base 20: mod_base = OTHER; note = 2'-O-methyluridine-3'-phosphate
  modified_base 21: mod_base = OTHER; note = 2'-deoxy-2'-fluorouridine
ttgaatgaactgaggcaaatt

SEQ ID NO: 992 - RNA, 21 nt, synthetic construct
  source 1..21: mol_type = other RNA
  modified_base 1: mod_base = OTHER; note = 2'-deoxy-2'-fluoroadenosine-3'-phosphate
  modified_base 2: mod_base = OTHER; note = 2'-O-methylcytidine-3'-phosphate
  modified_base 3: mod_base = OTHER; note = 2'-deoxy-2'-fluorouridine-3'-phosphate
  modified_base 4: mod_base = OTHER; note = 2'-O-methylguanosine-3'-phosphate
  modified_base 5: mod_base = OTHER; note = 2'-deoxy-2'-fluoroadenosine-3'-phosphate
  modified_base 6: mod_base = OTHER; note = 2'-O-methylguanosine-3'-phosphate
  modified_base 7: mod_base = OTHER; note = 2'-deoxy-2'-fluoroguanosine-3'-phosphate
  modified_base 8: mod_base = OTHER; note = 2'-O-methylcytidine-3'-phosphate
  modified_base 9: mod_base = OTHER; note = 2'-deoxy-2'-fluoroadenosine-3'-phosphate
  modified_base 10: mod_base = OTHER; note = 2'-deoxy-2'-fluoroadenosine-3'-phosphate
  modified_base 11: mod_base = OTHER; note = 2'-deoxy-2'-fluoroadenosine-3'-phosphate
  modified_base 12: mod_base = OTHER; note = 2'-O-methyluridine-3'-phosphate
  modified_base 13: mod_base = OTHER; note = 2'-deoxy-2'-fluorouridine-3'-phosphate
  modified_base 14: mod_base = OTHER; note = 2'-O-methyluridine-3'-phosphate
  modified_base 15: mod_base = OTHER; note = 2'-deoxy-2'-fluoroadenosine-3'-phosphate
  modified_base 16: mod_base = OTHER; note = 2'-O-methyladenosine-3'-phosphate
  modified_base 17: mod_base = OTHER; note = 2'-deoxy-2'-fluoroadenosine-3'-phosphate
  modified_base 18: mod_base = OTHER; note = 2'-O-methyladenosine-3'-phosphate
  modified_base 19: mod_base = OTHER; note = 2'-deoxy-2'-fluoroguanosine-3'-phosphate
  modified_base 20: mod_base = OTHER; note = 2'-O-methylguanosine-3'-phosphate
  modified_base 21: mod_base = OTHER; note = 2'-deoxy-2'-fluoroadenosine
actgaggcaaatttaaaagga

SEQ ID NO: 993 - RNA, 21 nt, synthetic construct
  source 1..21: mol_type = other RNA
  modified_base 1: mod_base = OTHER; note = 2'-deoxy-2'-fluoroguanosine-3'-phosphate
  modified_base 2: mod_base = OTHER; note = 2'-O-methyladenosine-3'-phosphate
  modified_base 3: mod_base = OTHER; note = 2'-deoxy-2'-fluoroguanosine-3'-phosphate
  modified_base 4: mod_base = OTHER; note = 2'-O-methyluridine-3'-phosphate
  modified_base 5: mod_base = OTHER; note = 2'-deoxy-2'-fluoroadenosine-3'-phosphate
  modified_base 6: mod_base = OTHER; note = 2'-O-methyluridine-3'-phosphate
  modified_base 7: mod_base = OTHER; note = 2'-deoxy-2'-fluoroguanosine-3'-phosphate
  modified_base 8: mod_base = OTHER; note = 2'-O-methyluridine-3'-phosphate
  modified_base 9: mod_base = OTHER; note = 2'-deoxy-2'-fluoroguanosine-3'-phosphate
  modified_base 10: mod_base = OTHER; note = 2'-deoxy-2'-fluorouridine-3'-phosphate
  modified_base 11: mod_base = OTHER; note = 2'-deoxy-2'-fluoroadenosine-3'-phosphate
  modified_base 12: mod_base = OTHER; note = 2'-O-methyladenosine-3'-phosphate
  modified_base 13: mod_base = OTHER; note = 2'-deoxy-2'-fluoroadenosine-3'-phosphate
  modified_base 14: mod_base = OTHER; note = 2'-O-methyladenosine-3'-phosphate
  modified_base 15: mod_base = OTHER; note = 2'-deoxy-2'-fluoroadenosine-3'-phosphate
  modified_base 16: mod_base = OTHER; note = 2'-O-methyluridine-3'-phosphate
  modified_base 17: mod_base = OTHER; note = 2'-deoxy-2'-fluorocytidine-3'-phosphate
  modified_base 18: mod_base = OTHER; note = 2'-O-methyluridine-3'-phosphate
  modified_base 19: mod_base = OTHER; note = 2'-deoxy-2'-fluoroguanosine-3'-phosphate
  modified_base 20: mod_base = OTHER; note = 2'-O-methyluridine-3'-phosphate
  modified_base 21: mod_base = OTHER; note = 2'-deoxy-2'-fluoroadenosine
gagtatgtgtaaaaatctgta

SEQ ID NO: 994 - RNA, 21 nt, synthetic construct
  source 1..21: mol_type = other RNA
  modified_base 1: mod_base = OTHER; note = 2'-deoxy-2'-fluoroadenosine-3'-phosphate
  modified_base 2: mod_base = OTHER; note = 2'-O-methylcytidine-3'-phosphate
  modified_base 3: mod_base = OTHER; note = 2'-deoxy-2'-fluorouridine-3'-phosphate
  modified_base 4: mod_base = OTHER; note = 2'-O-methyluridine-3'-phosphate
  modified_base 5: mod_base = OTHER; note = 2'-deoxy-2'-fluoroguanosine-3'-phosphate
  modified_base 6: mod_base = OTHER; note = 2'-O-methylguanosine-3'-phosphate
  modified_base 7: mod_base = OTHER; note = 2'-deoxy-2'-fluoroguanosine-3'-phosphate
  modified_base 8: mod_base = OTHER; note = 2'-O-methyladenosine-3'-phosphate
  modified_base 9: mod_base = OTHER; note = 2'-deoxy-2'-fluorouridine-3'-phosphate
  modified_base 10: mod_base = OTHER; note = 2'-deoxy-2'-fluorocytidine-3'-phosphate
  modified_base 11: mod_base = OTHER; note = 2'-deoxy-2'-fluoroadenosine-3'-phosphate
  modified_base 12: mod_base = OTHER; note = 2'-O-methylcytidine-3'-phosphate
  modified_base 13: mod_base = OTHER; note = 2'-deoxy-2'-fluoroadenosine-3'-phosphate
  modified_base 14: mod_base = OTHER; note = 2'-O-methyladenosine-3'-phosphate
  modified_base 15: mod_base = OTHER; note = 2'-deoxy-2'-fluoroadenosine-3'-phosphate
  modified_base 16: mod_base = OTHER; note = 2'-O-methylguanosine-3'-phosphate
  modified_base 17: mod_base = OTHER; note = 2'-deoxy-2'-fluorocytidine-3'-phosphate
  modified_base 18: mod_base = OTHER; note = 2'-O-methyladenosine-3'-phosphate
  modified_base 19: mod_base = OTHER; note = 2'-deoxy-2'-fluoroadenosine-3'-phosphate
  modified_base 20: mod_base = OTHER; note = 2'-O-methyladenosine-3'-phosphate
  modified_base 21: mod_base = OTHER; note = 2'-deoxy-2'-fluoroadenosine
acttgggatcacaaagcaaaa

SEQ ID NO: 995 - RNA, 21 nt, synthetic construct
  source 1..21: mol_type = other RNA
  modified_base 1: mod_base = OTHER; note = 2'-deoxy-2'-fluoroadenosine-3'-phosphate
  modified_base 2: mod_base = OTHER; note = 2'-O-methyluridine-3'-phosphate
  modified_base 3: mod_base = OTHER; note = 2'-deoxy-2'-fluoroguanosine-3'-phosphate
  modified_base 4: mod_base = OTHER; note = 2'-O-methylguanosine-3'-phosphate
  modified_base 5: mod_base = OTHER; note = 2'-deoxy-2'-fluorouridine-3'-phosphate
  modified_base 6: mod_base = OTHER; note = 2'-O-methyladenosine-3'-phosphate
  modified_base 7: mod_base = OTHER; note = 2'-deoxy-2'-fluoroadenosine-3'-phosphate
  modified_base 8: mod_base = OTHER; note = 2'-O-methyladenosine-3'-phosphate
  modified_base 9: mod_base = OTHER; note = 2'-deoxy-2'-fluorouridine-3'-phosphate
  modified_base 10: mod_base = OTHER; note = 2'-deoxy-2'-fluoroadenosine-3'-phosphate
  modified_base 11: mod_base = OTHER; note = 2'-deoxy-2'-fluorouridine-3'-phosphate
  modified_base 12: mod_base = OTHER; note = 2'-O-methyladenosine-3'-phosphate
  modified_base 13: mod_base = OTHER; note = 2'-deoxy-2'-fluoroadenosine-3'-phosphate
  modified_base 14: mod_base = OTHER; note = 2'-O-methylcytidine-3'-phosphate
  modified_base 15: mod_base = OTHER; note = 2'-deoxy-2'-fluoroadenosine-3'-phosphate
  modified_base 16: mod_base = OTHER; note = 2'-O-methyladenosine-3'-phosphate
  modified_base 17: mod_base = OTHER; note = 2'-deoxy-2'-fluoroadenosine-3'-phosphate
  modified_base 18: mod_base = OTHER; note = 2'-O-methylcytidine-3'-phosphate
  modified_base 19: mod_base = OTHER; note = 2'-deoxy-2'-fluorocytidine-3'-phosphate
  modified_base 20: mod_base = OTHER; note = 2'-O-methyladenosine-3'-phosphate
  modified_base 21: mod_base = OTHER; note = 2'-deoxy-2'-fluoroadenosine
atggtaaatataacaaaccaa

SEQ ID NO: 996 - RNA, 21 nt, synthetic construct
  source 1..21: mol_type = other RNA
  modified_base 1: mod_base = OTHER; note = 2'-deoxy-2'-fluorouridine-3'-phosphate
  modified_base 2: mod_base = OTHER; note = 2'-O-methylguanosine-3'-phosphate
  modified_base 3: mod_base = OTHER; note = 2'-deoxy-2'-fluoroadenosine-3'-phosphate
  modified_base 4: mod_base = OTHER; note = 2'-O-methyladenosine-3'-phosphate
  modified_base 5: mod_base = OTHER; note = 2'-deoxy-2'-fluorouridine-3'-phosphate
  modified_base 6: mod_base = OTHER; note = 2'-O-methylguanosine-3'-phosphate
  modified_base 7: mod_base = OTHER; note = 2'-deoxy-2'-fluoroadenosine-3'-phosphate
  modified_base 8: mod_base = OTHER; note = 2'-O-methyladenosine-3'-phosphate
  modified_base 9: mod_base = OTHER; note = 2'-deoxy-2'-fluorocytidine-3'-phosphate
  modified_base 10: mod_base = OTHER; note = 2'-deoxy-2'-fluorouridine-3'-phosphate
  modified_base 11: mod_base = OTHER; note = 2'-deoxy-2'-fluoroguanosine-3'-phosphate
  modified_base 12: mod_base = OTHER; note = 2'-O-methyladenosine-3'-phosphate
  modified_base 13: mod_base = OTHER; note = 2'-deoxy-2'-fluoroguanosine-3'-phosphate
  modified_base 14: mod_base = OTHER; note = 2'-O-methylguanosine-3'-phosphate
  modified_base 15: mod_base = OTHER; note = 2'-deoxy-2'-fluorocytidine-3'-phosphate
  modified_base 16: mod_base = OTHER; note = 2'-O-methyladenosine-3'-phosphate
  modified_base 17: mod_base = OTHER; note = 2'-deoxy-2'-fluoroadenosine-3'-phosphate
  modified_base 18: mod_base = OTHER; note = 2'-O-methyladenosine-3'-phosphate
  modified_base 19: mod_base = OTHER; note = 2'-deoxy-2'-fluorouridine-3'-phosphate
  modified_base 20: mod_base = OTHER; note = 2'-O-methyluridine-3'-phosphate
  modified_base 21: mod_base = OTHER; note = 2'-deoxy-2'-fluorouridine
tgaatgaactgaggcaaattt

SEQ ID NO: 997 - RNA, 21 nt, synthetic construct
  source 1..21: mol_type = other RNA
  modified_base 1: mod_base = OTHER; note = 2'-deoxy-2'-fluorocytidine-3'-phosphate
  modified_base 2: mod_base = OTHER; note = 2'-O-methyluridine-3'-phosphate
  modified_base 3: mod_base = OTHER; note = 2'-deoxy-2'-fluoroguanosine-3'-phosphate
  modified_base 4: mod_base = OTHER; note = 2'-O-methyladenosine-3'-phosphate
  modified_base 5: mod_base = OTHER; note = 2'-deoxy-2'-fluoroguanosine-3'-phosphate
  modified_base 6: mod_base = OTHER; note = 2'-O-methylguanosine-3'-phosphate
  modified_base 7: mod_base = OTHER; note = 2'-deoxy-2'-fluorocytidine-3'-phosphate
  modified_base 8: mod_base = OTHER; note = 2'-O-methyladenosine-3'-phosphate
  modified_base 9: mod_base = OTHER; note = 2'-deoxy-2'-fluoroadenosine-3'-phosphate
  modified_base 10: mod_base = OTHER; note = 2'-deoxy-2'-fluoroadenosine-3'-phosphate
  modified_base 11: mod_base = OTHER; note = 2'-deoxy-2'-fluorouridine-3'-phosphate
  modified_base 12: mod_base = OTHER; note = 2'-O-methyluridine-3'-phosphate
  modified_base 13: mod_base = OTHER; note = 2'-deoxy-2'-fluorouridine-3'-phosphate
  modified_base 14: mod_base = OTHER; note = 2'-O-methyladenosine-3'-phosphate
  modified_base 15: mod_base = OTHER; note = 2'-deoxy-2'-fluoroadenosine-3'-phosphate
  modified_base 16: mod_base = OTHER; note = 2'-O-methyladenosine-3'-phosphate
  modified_base 17: mod_base = OTHER; note = 2'-deoxy-2'-fluoroadenosine-3'-phosphate
  modified_base 18: mod_base = OTHER; note = 2'-O-methylguanosine-3'-phosphate
  modified_base 19: mod_base = OTHER; note = 2'-deoxy-2'-fluoroguanosine-3'-phosphate
  modified_base 20: mod_base = OTHER; note = 2'-O-methylcytidine-3'-phosphate
  modified_base 21: mod_base = OTHER; note = 2'-deoxy-2'-fluoroadenosine
ctgaggcaaatttaaaaggca

SEQ ID NO: 998 - RNA, 21 nt, synthetic construct
  source 1..21: mol_type = other RNA
  modified_base 1: mod_base = OTHER; note = 2'-deoxy-2'-fluoroadenosine-3'-phosphate
  modified_base 2: mod_base = OTHER; note = 2'-O-methylguanosine-3'-phosphate
  modified_base 3: mod_base = OTHER; note = 2'-deoxy-2'-fluorouridine-3'-phosphate
  modified_base 4: mod_base = OTHER; note = 2'-O-methyladenosine-3'-phosphate
  modified_base 5: mod_base = OTHER; note = 2'-deoxy-2'-fluorouridine-3'-phosphate
  modified_base 6: mod_base = OTHER; note = 2'-O-methylguanosine-3'-phosphate
  modified_base 7: mod_base = OTHER; note = 2'-deoxy-2'-fluorouridine-3'-phosphate
  modified_base 8: mod_base = OTHER; note = 2'-O-methylguanosine-3'-phosphate
  modified_base 9: mod_base = OTHER; note = 2'-deoxy-2'-fluorouridine-3'-phosphate
  modified_base 10: mod_base = OTHER; note = 2'-deoxy-2'-fluoroadenosine-3'-phosphate
  modified_base 11: mod_base = OTHER; note = 2'-deoxy-2'-fluoroadenosine-3'-phosphate
  modified_base 12: mod_base = OTHER; note = 2'-O-methyladenosine-3'-phosphate
  modified_base 13: mod_base = OTHER; note = 2'-deoxy-2'-fluoroadenosine-3'-phosphate
  modified_base 14: mod_base = OTHER; note = 2'-O-methyladenosine-3'-phosphate
  modified_base 15: mod_base = OTHER; note = 2'-deoxy-2'-fluorouridine-3'-phosphate
  modified_base 16: mod_base = OTHER; note = 2'-O-methylcytidine-3'-phosphate
  modified_base 17: mod_base = OTHER; note = 2'-deoxy-2'-fluorouridine-3'-phosphate
  modified_base 18: mod_base = OTHER; note = 2'-O-methylguanosine-3'-phosphate
  modified_base 19: mod_base = OTHER; note = 2'-deoxy-2'-fluorouridine-3'-phosphate
  modified_base 20: mod_base = OTHER; note = 2'-O-methyladenosine-3'-phosphate
  modified_base 21: mod_base = OTHER; note = 2'-deoxy-2'-fluoroadenosine
agtatgtgtaaaaatctgtaa

SEQ ID NO: 999 - RNA, 21 nt, synthetic construct
  source 1..21: mol_type = other RNA
  modified_base 1: mod_base = OTHER; note = 2'-deoxy-2'-fluoroguanosine-3'-phosphate
  modified_base 2: mod_base = OTHER; note = 2'-O-methyladenosine-3'-phosphate
  modified_base 3: mod_base = OTHER; note = 2'-deoxy-2'-fluoroadenosine-3'-phosphate
  modified_base 4: mod_base = OTHER; note = 2'-O-methyladenosine-3'-phosphate
  modified_base 5: mod_base = OTHER; note = 2'-deoxy-2'-fluoroadenosine-3'-phosphate
  modified_base 6: mod_base = OTHER; note = 2'-O-methylcytidine-3'-phosphate
  modified_base 7: mod_base = OTHER; note = 2'-deoxy-2'-fluoroadenosine-3'-phosphate
  modified_base 8: mod_base = OTHER; note = 2'-O-methyladenosine-3'-phosphate
  modified_base 9: mod_base = OTHER; note = 2'-deoxy-2'-fluoroadenosine-3'-phosphate
  modified_base 10: mod_base = OTHER; note = 2'-deoxy-2'-fluoroguanosine-3'-phosphate
  modified_base 11: mod_base = OTHER; note = 2'-deoxy-2'-fluoroadenosine-3'-phosphate
  modified_base 12: mod_base = OTHER; note = 2'-O-methyluridine-3'-phosphate
  modified_base 13: mod_base = OTHER; note = 2'-deoxy-2'-fluorouridine-3'-phosphate
  modified_base 14: mod_base = OTHER; note = 2'-O-methyluridine-3'-phosphate
  modified_base 15: mod_base = OTHER; note = 2'-deoxy-2'-fluoroguanosine-3'-phosphate
  modified_base 16: mod_base = OTHER; note = 2'-O-methylguanosine-3'-phosphate
  modified_base 17: mod_base = OTHER; note = 2'-deoxy-2'-fluorouridine-3'-phosphate
  modified_base 18: mod_base = OTHER; note = 2'-O-methylguanosine-3'-phosphate
  modified_base 19: mod_base = OTHER; note = 2'-deoxy-2'-fluorouridine-3'-phosphate
  modified_base 20: mod_base = OTHER; note = 2'-O-methyluridine-3'-phosphate
  modified_base 21: mod_base = OTHER; note = 2'-deoxy-2'-fluorouridine
gaaaacaaagatttggtgttt

SEQ ID NO: 1000 - RNA, 21 nt, synthetic construct
  source 1..21: mol_type = other RNA
  modified_base 1: mod_base = OTHER; note = 2'-deoxy-2'-fluoroadenosine-3'-phosphate
  modified_base 2: mod_base = OTHER; note = 2'-O-methylguanosine-3'-phosphate
  modified_base 3: mod_base = OTHER; note = 2'-deoxy-2'-fluorouridine-3'-phosphate
  modified_base 4: mod_base = OTHER; note = 2'-O-methylguanosine-3'-phosphate
  modified_base 5: mod_base = OTHER; note = 2'-deoxy-2'-fluorouridine-3'-phosphate
  modified_base 6: mod_base = OTHER; note = 2'-O-methylguanosine-3'-phosphate
  modified_base 7: mod_base = OTHER; note = 2'-deoxy-2'-fluoroguanosine-3'-phosphate
  modified_base 8: mod_base = OTHER; note = 2'-O-methyladenosine-3'-phosphate
  modified_base 9: mod_base = OTHER; note = 2'-deoxy-2'-fluoroguanosine-3'-phosphate
  modified_base 10: mod_base = OTHER; note = 2'-deoxy-2'-fluoroadenosine-3'-phosphate
  modified_base 11: mod_base = OTHER; note = 2'-deoxy-2'-fluoroadenosine-3'-phosphate
  modified_base 12: mod_base = OTHER; note = 2'-O-methyladenosine-3'-phosphate
  modified_base 13: mod_base = OTHER; note = 2'-deoxy-2'-fluoroadenosine-3'-phosphate
  modified_base 14: mod_base = OTHER; note = 2'-O-methylcytidine-3'-phosphate
  modified_base 15: mod_base = OTHER; note = 2'-deoxy-2'-fluoroadenosine-3'-phosphate
  modified_base 16: mod_base = OTHER; note = 2'-O-methyladenosine-3'-phosphate
  modified_base 17: mod_base = OTHER; note = 2'-deoxy-2'-fluorocytidine-3'-phosphate
  modified_base 18: mod_base = OTHER; note = 2'-O-methylcytidine-3'-phosphate
  modified_base 19: mod_base = OTHER; note = 2'-deoxy-2'-fluorouridine-3'-phosphate
  modified_base 20: mod_base = OTHER; note = 2'-O-methyladenosine-3'-phosphate
  modified_base 21: mod_base = OTHER; note = 2'-deoxy-2'-fluoroadenosine
agtgtggagaaaacaacctaa

SEQ ID NO: 1001 - RNA, 21 nt, synthetic construct
  source 1..21: mol_type = other RNA
  modified_base 1: mod_base = OTHER; note = 2'-deoxy-2'-fluoroguanosine-3'-phosphate
  modified_base 2: mod_base = OTHER; note = 2'-O-methyluridine-3'-phosphate
  modified_base 3: mod_base = OTHER; note = 2'-deoxy-2'-fluorocytidine-3'-phosphate
  modified_base 4: mod_base = OTHER; note = 2'-O-methyluridine-3'-phosphate
  modified_base 5: mod_base = OTHER; note = 2'-deoxy-2'-fluorocytidine-3'-phosphate
  modified_base 6: mod_base = OTHER; note = 2'-O-methyladenosine-3'-phosphate
  modified_base 7: mod_base = OTHER; note = 2'-deoxy-2'-fluoroadenosine-3'-phosphate
  modified_base 8: mod_base = OTHER; note = 2'-O-methyladenosine-3'-phosphate
  modified_base 9: mod_base = OTHER; note = 2'-deoxy-2'-fluoroadenosine-3'-phosphate
  modified_base 10: mod_base = OTHER; note = 2'-deoxy-2'-fluorouridine-3'-phosphate
  modified_base 11: mod_base = OTHER; note = 2'-deoxy-2'-fluoroguanosine-3'-phosphate
  modified_base 12: mod_base = OTHER; note = 2'-O-methylguanosine-3'-phosphate
  modified_base 13: mod_base = OTHER; note = 2'-deoxy-2'-fluoroadenosine-3'-phosphate
  modified_base 14: mod_base = OTHER; note = 2'-O-methyladenosine-3'-phosphate
  modified_base 15: mod_base = OTHER; note = 2'-deoxy-2'-fluoroguanosine-3'-phosphate
  modified_base 16: mod_base = OTHER; note = 2'-O-methylguanosine-3'-phosphate
  modified_base 17: mod_base = OTHER; note = 2'-deoxy-2'-fluorouridine-3'-phosphate
  modified_base 18: mod_base = OTHER; note = 2'-O-methyluridine-3'-phosphate
  modified_base 19: mod_base = OTHER; note = 2'-deoxy-2'-fluoroadenosine-3'-phosphate
  modified_base 20: mod_base = OTHER; note = 2'-O-methyluridine-3'-phosphate
  modified_base 21: mod_base = OTHER; note = 2'-deoxy-2'-fluoroadenosine
gtctcaaaatggaaggttata

SEQ ID NO: 1002 - RNA, 21 nt, synthetic construct
  source 1..21: mol_type = other RNA
  modified_base 1: mod_base = OTHER; note = 2'-deoxy-2'-fluoroguanosine-3'-phosphate
  modified_base 2: mod_base = OTHER; note = 2'-O-methyladenosine-3'-phosphate
  modified_base 3: mod_base = OTHER; note = 2'-deoxy-2'-fluoroadenosine-3'-phosphate
  modified_base 4: mod_base = OTHER; note = 2'-O-methyluridine-3'-phosphate
  modified_base 5: mod_base = OTHER; note = 2'-deoxy-2'-fluoroguanosine-3'-phosphate
  modified_base 6: mod_base = OTHER; note = 2'-O-methyladenosine-3'-phosphate
  modified_base 7: mod_base = OTHER; note = 2'-deoxy-2'-fluoroadenosine-3'-phosphate
  modified_base 8: mod_base = OTHER; note = 2'-O-methylcytidine-3'-phosphate
  modified_base 9: mod_base = OTHER; note = 2'-deoxy-2'-fluorouridine-3'-phosphate
  modified_base 10: mod_base = OTHER; note = 2'-deoxy-2'-fluoroguanosine-3'-phosphate
  modified_base 11: mod_base = OTHER; note = 2'-deoxy-2'-fluoroadenosine-3'-phosphate
  modified_base 12: mod_base = OTHER; note = 2'-O-methylguanosine-3'-phosphate
  modified_base 13: mod_base = OTHER; note = 2'-deoxy-2'-fluoroguanosine-3'-phosphate
  modified_base 14: mod_base = OTHER; note = 2'-O-methylcytidine-3'-phosphate
  modified_base 15: mod_base = OTHER; note = 2'-deoxy-2'-fluoroadenosine-3'-phosphate
  modified_base 16: mod_base = OTHER; note = 2'-O-methyladenosine-3'-phosphate
  modified_base 17: mod_base = OTHER; note = 2'-deoxy-2'-fluoroadenosine-3'-phosphate
  modified_base 18: mod_base = OTHER; note = 2'-O-methyluridine-3'-phosphate
  modified_base 19: mod_base = OTHER; note = 2'-deoxy-2'-fluorouridine-3'-phosphate
  modified_base 20: mod_base = OTHER; note = 2'-O-methyluridine-3'-phosphate
  modified_base 21: mod_base = OTHER; note = 2'-deoxy-2'-fluoroadenosine
gaatgaactgaggcaaattta

SEQ ID NO: 1003 - RNA, 21 nt, synthetic construct
  source 1..21: mol_type = other RNA
  modified_base 1: mod_base = OTHER; note = 2'-deoxy-2'-fluorouridine-3'-phosphate
  modified_base 2: mod_base = OTHER; note = 2'-O-methylguanosine-3'-phosphate
  modified_base 3: mod_base = OTHER; note = 2'-deoxy-2'-fluoroadenosine-3'-phosphate
  modified_base 4: mod_base = OTHER; note = 2'-O-methylguanosine-3'-phosphate
  modified_base 5: mod_base = OTHER; note = 2'-deoxy-2'-fluoroguanosine-3'-phosphate
  modified_base 6: mod_base = OTHER; note = 2'-O-methylcytidine-3'-phosphate
  modified_base 7: mod_base = OTHER; note = 2'-deoxy-2'-fluoroadenosine-3'-phosphate
  modified_base 8: mod_base = OTHER; note = 2'-O-methyladenosine-3'-phosphate
  modified_base 9: mod_base = OTHER; note = 2'-deoxy-2'-fluoroadenosine-3'-phosphate
  modified_base 10: mod_base = OTHER; note = 2'-deoxy-2'-fluorouridine-3'-phosphate
  modified_base 11: mod_base = OTHER; note = 2'-deoxy-2'-fluorouridine-3'-phosphate
  modified_base 12: mod_base = OTHER; note = 2'-O-methyluridine-3'-phosphate
  modified_base 13: mod_base = OTHER; note = 2'-deoxy-2'-fluoroadenosine-3'-phosphate
  modified_base 14: mod_base = OTHER; note = 2'-O-methyladenosine-3'-phosphate
  modified_base 15: mod_base = OTHER; note = 2'-deoxy-2'-fluoroadenosine-3'-phosphate
  modified_base 16: mod_base = OTHER; note = 2'-O-methyladenosine-3'-phosphate
  modified_base 17: mod_base = OTHER; note = 2'-deoxy-2'-fluoroguanosine-3'-phosphate
  modified_base 18: mod_base = OTHER; note = 2'-O-methylguanosine-3'-phosphate
  modified_base 19: mod_base = OTHER; note = 2'-deoxy-2'-fluorocytidine-3'-phosphate
  modified_base 20: mod_base = OTHER; note = 2'-O-methyladenosine-3'-phosphate
  modified_base 21: mod_base = OTHER; note = 2'-deoxy-2'-fluoroadenosine
tgaggcaaatttaaaaggcaa

SEQ ID NO: 1004 - RNA, 21 nt, synthetic construct
  source 1..21: mol_type = other RNA
  modified_base 1: mod_base = OTHER; note = 2'-deoxy-2'-fluoroguanosine-3'-phosphate
  modified_base 2: mod_base = OTHER; note = 2'-O-methyluridine-3'-phosphate
  modified_base 3: mod_base = OTHER; note = 2'-deoxy-2'-fluoroadenosine-3'-phosphate
  modified_base 4: mod_base = OTHER; note = 2'-O-methyluridine-3'-phosphate
  modified_base 5: mod_base = OTHER; note = 2'-deoxy-2'-fluoroguanosine-3'-phosphate
  modified_base 6: mod_base = OTHER; note = 2'-O-methyluridine-3'-phosphate
  modified_base 7: mod_base = OTHER; note = 2'-deoxy-2'-fluoroguanosine-3'-phosphate
  modified_base 8: mod_base = OTHER; note = 2'-O-methyluridine-3'-phosphate
  modified_base 9: mod_base = OTHER; note = 2'-deoxy-2'-fluoroadenosine-3'-phosphate
  modified_base 10: mod_base = OTHER; note = 2'-deoxy-2'-fluoroadenosine-3'-phosphate
  modified_base 11: mod_base = OTHER; note = 2'-deoxy-2'-fluoroadenosine-3'-phosphate
  modified_base 12: mod_base = OTHER; note = 2'-O-methyladenosine-3'-phosphate
  modified_base 13: mod_base = OTHER; note = 2'-deoxy-2'-fluoroadenosine-3'-phosphate
  modified_base 14: mod_base = OTHER; note = 2'-O-methyluridine-3'-phosphate
  modified_base 15: mod_base = OTHER; note = 2'-deoxy-2'-fluorocytidine-3'-phosphate
  modified_base 16: mod_base = OTHER; note = 2'-O-methyluridine-3'-phosphate
  modified_base 17: mod_base = OTHER; note = 2'-deoxy-2'-fluoroguanosine-3'-phosphate
  modified_base 18: mod_base = OTHER; note = 2'-O-methyluridine-3'-phosphate
  modified_base 19: mod_base = OTHER; note = 2'-deoxy-2'-fluoroadenosine-3'-phosphate
  modified_base 20: mod_base = OTHER; note = 2'-O-methyladenosine-3'-phosphate
  modified_base 21: mod_base = OTHER; note = 2'-deoxy-2'-fluorouridine
gtatgtgtaaaaatctgtaat

SEQ ID NO: 1005 - RNA, 21 nt, synthetic construct
  source 1..21: mol_type = other RNA
  modified_base 1: mod_base = OTHER; note = 2'-deoxy-2'-fluoroadenosine-3'-phosphate
  modified_base 2: mod_base = OTHER; note = 2'-O-methyladenosine-3'-phosphate
  modified_base 3: mod_base = OTHER; note = 2'-deoxy-2'-fluoroadenosine-3'-phosphate
  modified_base 4: mod_base = OTHER; note = 2'-O-methyladenosine-3'-phosphate
  modified_base 5: mod_base = OTHER; note = 2'-deoxy-2'-fluorocytidine-3'-phosphate
  modified_base 6: mod_base = OTHER; note = 2'-O-methyladenosine-3'-phosphate
  modified_base 7: mod_base = OTHER; note = 2'-deoxy-2'-fluoroadenosine-3'-phosphate
  modified_base 8: mod_base = OTHER; note = 2'-O-methyladenosine-3'-phosphate
  modified_base 9: mod_base = OTHER; note = 2'-deoxy-2'-fluoroguanosine-3'-phosphate
  modified_base 10: mod_base = OTHER; note = 2'-deoxy-2'-fluoroadenosine-3'-phosphate
  modified_base 11: mod_base = OTHER; note = 2'-deoxy-2'-fluorouridine-3'-phosphate
  modified_base 12: mod_base = OTHER; note = 2'-O-methyluridine-3'-phosphate
  modified_base 13: mod_base = OTHER; note = 2'-deoxy-2'-fluorouridine-3'-phosphate
  modified_base 14: mod_base = OTHER; note = 2'-O-methylguanosine-3'-phosphate
  modified_base 15: mod_base = OTHER; note = 2'-deoxy-2'-fluoroguanosine-3'-phosphate
  modified_base 16: mod_base = OTHER; note = 2'-O-methyluridine-3'-phosphate
  modified_base 17: mod_base = OTHER; note = 2'-deoxy-2'-fluoroguanosine-3'-phosphate
  modified_base 18: mod_base = OTHER; note = 2'-O-methyluridine-3'-phosphate
  modified_base 19: mod_base = OTHER; note = 2'-deoxy-2'-fluorouridine-3'-phosphate
  modified_base 20: mod_base = OTHER; note = 2'-O-methyluridine-3'-phosphate
  modified_base 21: mod_base = OTHER; note = 2'-deoxy-2'-fluorouridine
aaaacaaagatttggtgtttt

SEQ ID NO: 1006 - RNA, 21 nt, synthetic construct
  source 1..21: mol_type = other RNA
  modified_base 1: mod_base = OTHER; note = 2'-deoxy-2'-fluoroguanosine-3'-phosphate
  modified_base 2: mod_base = OTHER; note = 2'-O-methyluridine-3'-phosphate
  modified_base 3: mod_base = OTHER; note = 2'-deoxy-2'-fluoroguanosine-3'-phosphate
  modified_base 4: mod_base = OTHER; note = 2'-O-methyluridine-3'-phosphate
  modified_base 5: mod_base = OTHER; note = 2'-deoxy-2'-fluoroguanosine-3'-phosphate
  modified_base 6: mod_base = OTHER; note = 2'-O-methylguanosine-3'-phosphate
  modified_base 7: mod_base = OTHER; note = 2'-deoxy-2'-fluoroadenosine-3'-phosphate
  modified_base 8: mod_base = OTHER; note = 2'-O-methylguanosine-3'-phosphate
  modified_base 9: mod_base = OTHER; note = 2'-deoxy-2'-fluoroadenosine-3'-phosphate
  modified_base 10: mod_base = OTHER; note = 2'-deoxy-2'-fluoroadenosine-3'-phosphate
  modified_base 11: mod_base = OTHER; note = 2'-deoxy-2'-fluoroadenosine-3'-phosphate
  modified_base 12: mod_base = OTHER; note = 2'-O-methyladenosine-3'-phosphate
  modified_base 13: mod_base = OTHER; note = 2'-deoxy-2'-fluorocytidine-3'-phosphate
  modified_base 14: mod_base = OTHER; note = 2'-O-methyladenosine-3'-phosphate
  modified_base 15: mod_base = OTHER; note = 2'-deoxy-2'-fluoroadenosine-3'-phosphate
  modified_base 16: mod_base = OTHER; note = 2'-O-methylcytidine-3'-phosphate
  modified_base 17: mod_base = OTHER; note = 2'-deoxy-2'-fluorocytidine-3'-phosphate
  modified_base 18: mod_base = OTHER; note = 2'-O-methyluridine-3'-phosphate
  modified_base 19: mod_base = OTHER; note = 2'-deoxy-2'-fluoroadenosine-3'-phosphate
  modified_base 20: mod_base = OTHER; note = 2'-O-methyladenosine-3'-phosphate
  modified_base 21: mod_base = OTHER; note = 2'-deoxy-2'-fluoroadenosine
gtgtggagaaaacaacctaaa

SEQ ID NO: 1007 - RNA, 21 nt, synthetic construct
  source 1..21: mol_type = other RNA
  modified_base 1: mod_base = OTHER; note = 2'-deoxy-2'-fluoroadenosine-3'-phosphate
  modified_base 2: mod_base = OTHER; note = 2'-O-methyluridine-3'-phosphate
  modified_base 3: mod_base = OTHER; note = 2'-deoxy-2'-fluoroguanosine-3'-phosphate
  modified_base 4: mod_base = OTHER; note = 2'-O-methylguanosine-3'-phosphate
  modified_base 5: mod_base = OTHER; note = 2'-deoxy-2'-fluoroadenosine-3'-phosphate
  modified_base 6: mod_base = OTHER; note = 2'-O-methyladenosine-3'-phosphate
  modified_base 7: mod_base = OTHER; note = 2'-deoxy-2'-fluoroguanosine-3'-phosphate
  modified_base 8: mod_base = OTHER; note = 2'-O-methylguanosine-3'-phosphate
  modified_base 9: mod_base = OTHER; note = 2'-deoxy-2'-fluorouridine-3'-phosphate
  modified_base 10: mod_base = OTHER; note = 2'-deoxy-2'-fluorouridine-3'-phosphate
  modified_base 11: mod_base = OTHER; note = 2'-deoxy-2'-fluoroadenosine-3'-phosphate
  modified_base 12: mod_base = OTHER; note = 2'-O-methyluridine-3'-phosphate
  modified_base 13: mod_base = OTHER; note = 2'-deoxy-2'-fluoroadenosine-3'-phosphate
  modified_base 14: mod_base = OTHER; note = 2'-O-methylcytidine-3'-phosphate
  modified_base 15: mod_base = OTHER; note = 2'-deoxy-2'-fluorouridine-3'-phosphate
  modified_base 16: mod_base = OTHER; note = 2'-O-methylcytidine-3'-phosphate
  modified_base 17: mod_base = OTHER; note = 2'-deoxy-2'-fluorouridine-3'-phosphate
  modified_base 18: mod_base = OTHER; note = 2'-O-methyladenosine-3'-phosphate
  modified_base 19: mod_base = OTHER; note = 2'-deoxy-2'-fluorouridine-3'-phosphate
  modified_base 20: mod_base = OTHER; note = 2'-O-methyladenosine-3'-phosphate
  modified_base 21: mod_base = OTHER; note = 2'-deoxy-2'-fluoroadenosine
atggaaggttatactctataa

SEQ ID NO: 1008 - RNA, 21 nt, synthetic construct
  source 1..21: mol_type = other RNA
  modified_base 1: mod_base = OTHER; note = 2'-deoxy-2'-fluoroadenosine-3'-phosphate
  modified_base 2: mod_base = OTHER; note = 2'-O-methyladenosine-3'-phosphate
  modified_base 3: mod_base = OTHER; note = 2'-deoxy-2'-fluorouridine-3'-phosphate
  modified_base 4: mod_base = OTHER; note = 2'-O-methylguanosine-3'-phosphate
  modified_base 5: mod_base = OTHER; note = 2'-deoxy-2'-fluoroadenosine-3'-phosphate
  modified_base 6: mod_base = OTHER; note = 2'-O-methyladenosine-3'-phosphate
  modified_base 7: mod_base = OTHER; note = 2'-deoxy-2'-fluorocytidine-3'-phosphate
  modified_base 8: mod_base = OTHER; note = 2'-O-methyluridine-3'-phosphate
  modified_base 9: mod_base = OTHER; note = 2'-deoxy-2'-fluoroguanosine-3'-phosphate
  modified_base 10: mod_base = OTHER; note = 2'-deoxy-2'-fluoroadenosine-3'-phosphate
  modified_base 11: mod_base = OTHER; note = 2'-deoxy-2'-fluoroguanosine-3'-phosphate
  modified_base 12: mod_base = OTHER; note = 2'-O-methylguanosine-3'-phosphate
  modified_base 13: mod_base = OTHER; note = 2'-deoxy-2'-fluorocytidine-3'-phosphate
  modified_base 14: mod_base = OTHER; note = 2'-O-methyladenosine-3'-phosphate
  modified_base 15: mod_base = OTHER; note = 2'-deoxy-2'-fluoroadenosine-3'-phosphate
  modified_base 16: mod_base = OTHER; note = 2'-O-methyladenosine-3'-phosphate
  modified_base 17: mod_base = OTHER; note = 2'-deoxy-2'-fluorouridine-3'-phosphate
  modified_base 18: mod_base = OTHER; note = 2'-O-methyluridine-3'-phosphate
  modified_base 19: mod_base = OTHER; note = 2'-deoxy-2'-fluorouridine-3'-phosphate
  modified_base 20: mod_base = OTHER; note = 2'-O-methyladenosine-3'-phosphate
  modified_base 21: mod_base = OTHER; note = 2'-deoxy-2'-fluoroadenosine
aatgaactgaggcaaatttaa

SEQ ID NO: 1009 - RNA, 21 nt, synthetic construct
  source 1..21: mol_type = other RNA
  modified_base 1: mod_base = OTHER; note = 2'-deoxy-2'-fluoroguanosine-3'-phosphate
  modified_base 2: mod_base = OTHER; note = 2'-O-methyladenosine-3'-phosphate
  modified_base 3: mod_base = OTHER; note = 2'-deoxy-2'-fluoroguanosine-3'-phosphate
  modified_base 4: mod_base = OTHER; note = 2'-O-methylguanosine-3'-phosphate
  modified_base 5: mod_base = OTHER; note = 2'-deoxy-2'-fluorocytidine-3'-phosphate
  modified_base 6: mod_base = OTHER; note = 2'-O-methyladenosine-3'-phosphate
  modified_base 7: mod_base = OTHER; note = 2'-deoxy-2'-fluoroadenosine-3'-phosphate
  modified_base 8: mod_base = OTHER; note = 2'-O-methyladenosine-3'-phosphate
  modified_base 9: mod_base = OTHER; note = 2'-deoxy-2'-fluorouridine-3'-phosphate
  modified_base 10: mod_base = OTHER; note = 2'-deoxy-2'-fluorouridine-3'-phosphate
  modified_base 11: mod_base = OTHER; note = 2'-deoxy-2'-fluorouridine-3'-phosphate
  modified_base 12: mod_base = OTHER; note = 2'-O-methyladenosine-3'-phosphate
  modified_base 13: mod_base = OTHER; note = 2'-deoxy-2'-fluoroadenosine-3'-phosphate
  modified_base 14: mod_base = OTHER; note = 2'-O-methyladenosine-3'-phosphate
  modified_base 15: mod_base = OTHER; note = 2'-deoxy-2'-fluoroadenosine-3'-phosphate
  modified_base 16: mod_base = OTHER; note = 2'-O-methylguanosine-3'-phosphate
  modified_base 17: mod_base = OTHER; note = 2'-deoxy-2'-fluoroguanosine-3'-phosphate
  modified_base 18: mod_base = OTHER; note = 2'-O-methylcytidine-3'-phosphate
  modified_base 19: mod_base = OTHER; note = 2'-deoxy-2'-fluoroadenosine-3'-phosphate
  modified_base 20: mod_base = OTHER; note = 2'-O-methyladenosine-3'-phosphate
  modified_base 21: mod_base = OTHER; note = 2'-deoxy-2'-fluorouridine
gaggcaaatttaaaaggcaat

SEQ ID NO: 1010 - RNA, 21 nt, synthetic construct
  source 1..21: mol_type = other RNA
  modified_base 1: mod_base = OTHER; note = 2'-deoxy-2'-fluorouridine-3'-phosphate
  modified_base 2: mod_base = OTHER; note = 2'-O-methyladenosine-3'-phosphate
  modified_base 3: mod_base = OTHER; note = 2'-deoxy-2'-fluorouridine-3'-phosphate
  modified_base 4: mod_base = OTHER; note = 2'-O-methylguanosine-3'-phosphate
  modified_base 5: mod_base = OTHER; note = 2'-deoxy-2'-fluorouridine-3'-phosphate
  modified_base 6: mod_base = OTHER; note = 2'-O-methylguanosine-3'-phosphate
  modified_base 7: mod_base = OTHER; note = 2'-deoxy-2'-fluorouridine-3'-phosphate
  modified_base 8: mod_base = OTHER; note = 2'-O-methyladenosine-3'-phosphate
  modified_base 9: mod_base = OTHER; note = 2'-deoxy-2'-fluoroadenosine-3'-phosphate
  modified_base 10: mod_base = OTHER; note = 2'-deoxy-2'-fluoroadenosine-3'-phosphate
  modified_base 11: mod_base = OTHER; note = 2'-deoxy-2'-fluoroadenosine-3'-phosphate
  modified_base 12: mod_base = OTHER; note = 2'-O-methyladenosine-3'-phosphate
  modified_base 13: mod_base = OTHER; note = 2'-deoxy-2'-fluorouridine-3'-phosphate
  modified_base 14: mod_base = OTHER; note = 2'-O-methylcytidine-3'-phosphate
  modified_base 15: mod_base = OTHER; note = 2'-deoxy-2'-fluorouridine-3'-phosphate
  modified_base 16: mod_base = OTHER; note = 2'-O-methylguanosine-3'-phosphate
  modified_base 17: mod_base = OTHER; note = 2'-deoxy-2'-fluorouridine-3'-phosphate
  modified_base 18: mod_base = OTHER; note = 2'-O-methyladenosine-3'-phosphate
  modified_base 19: mod_base = OTHER; note = 2'-deoxy-2'-fluoroadenosine-3'-phosphate
  modified_base 20: mod_base = OTHER; note = 2'-O-methyluridine-3'-phosphate
  modified_base 21: mod_base = OTHER; note = 2'-deoxy-2'-fluoroadenosine
tatgtgtaaaaatctgtaata

SEQ ID NO: 1011 - RNA, 21 nt, synthetic construct
  source 1..21: mol_type = other RNA
  modified_base 1: mod_base = OTHER; note = 2'-deoxy-2'-fluoroadenosine-3'-phosphate
  modified_base 2: mod_base = OTHER; note = 2'-O-methylcytidine-3'-phosphate
  modified_base 3: mod_base = OTHER; note = 2'-deoxy-2'-fluoroadenosine-3'-phosphate
  modified_base 4: mod_base = OTHER; note = 2'-O-methyladenosine-3'-phosphate
  modified_base 5: mod_base = OTHER; note = 2'-deoxy-2'-fluoroadenosine-3'-phosphate
  modified_base 6: mod_base = OTHER; note = 2'-O-methylguanosine-3'-phosphate
  modified_base 7: mod_base = OTHER; note = 2'-deoxy-2'-fluoroadenosine-3'-phosphate
  modified_base 8: mod_base = OTHER; note = 2'-O-methyluridine-3'-phosphate
  modified_base 9: mod_base = OTHER; note = 2'-deoxy-2'-fluorouridine-3'-phosphate
  modified_base 10: mod_base = OTHER; note = 2'-deoxy-2'-fluorouridine-3'-phosphate
  modified_base 11: mod_base = OTHER; note = 2'-deoxy-2'-fluoroguanosine-3'-phosphate
  modified_base 12: mod_base = OTHER; note = 2'-O-methylguanosine-3'-phosphate
  modified_base 13: mod_base = OTHER; note = 2'-deoxy-2'-fluorouridine-3'-phosphate
  modified_base 14: mod_base = OTHER; note = 2'-O-methylguanosine-3'-phosphate
  modified_base 15: mod_base = OTHER; note = 2'-deoxy-2'-fluorouridine-3'-phosphate
  modified_base 16: mod_base = OTHER; note = 2'-O-methyluridine-3'-phosphate
  modified_base 17: mod_base = OTHER; note = 2'-deoxy-2'-fluorouridine-3'-phosphate
  modified_base 18: mod_base = OTHER; note = 2'-O-methyluridine-3'-phosphate
  modified_base 19: mod_base = OTHER; note = 2'-deoxy-2'-fluorocytidine-3'-phosphate
  modified_base 20: mod_base = OTHER; note = 2'-O-methyluridine-3'-phosphate
  modified_base 21: mod_base = OTHER; note = 2'-deoxy-2'-fluoroadenosine
acaaagatttggtgttttcta

SEQ ID NO: 1012 - RNA, 21 nt, synthetic construct
  source 1..21: mol_type = other RNA
  modified_base 1: mod_base = OTHER; note = 2'-deoxy-2'-fluorouridine-3'-phosphate
  modified_base 2: mod_base = OTHER; note = 2'-O-methylguanosine-3'-phosphate
  modified_base 3: mod_base = OTHER; note = 2'-deoxy-2'-fluorouridine-3'-phosphate
  modified_base 4: mod_base = OTHER; note = 2'-O-methylguanosine-3'-phosphate
  modified_base 5: mod_base = OTHER; note = 2'-deoxy-2'-fluoroguanosine-3'-phosphate
  modified_base 6: mod_base = OTHER; note = 2'-O-methyladenosine-3'-phosphate
  modified_base 7: mod_base = OTHER; note = 2'-deoxy-2'-fluoroguanosine-3'-phosphate
  modified_base 8: mod_base = OTHER; note = 2'-O-methyladenosine-3'-phosphate
  modified_base 9: mod_base = OTHER; note = 2'-deoxy-2'-fluoroadenosine-3'-phosphate
  modified_base 10: mod_base = OTHER; note = 2'-deoxy-2'-fluoroadenosine-3'-phosphate
  modified_base 11: mod_base = OTHER; note = 2'-deoxy-2'-fluoroadenosine-3'-phosphate
  modified_base 12: mod_base = OTHER; note = 2'-O-methylcytidine-3'-phosphate
  modified_base 13: mod_base = OTHER; note = 2'-deoxy-2'-fluoroadenosine-3'-phosphate
  modified_base 14: mod_base = OTHER; note = 2'-O-methyladenosine-3'-phosphate
  modified_base 15: mod_base = OTHER; note = 2'-deoxy-2'-fluorocytidine-3'-phosphate
  modified_base 16: mod_base = OTHER; note = 2'-O-methylcytidine-3'-phosphate
  modified_base 17: mod_base = OTHER; note = 2'-deoxy-2'-fluorouridine-3'-phosphate
  modified_base 18: mod_base = OTHER; note = 2'-O-methyladenosine-3'-phosphate
  modified_base 19: mod_base = OTHER; note = 2'-deoxy-2'-fluoroadenosine-3'-phosphate
  modified_base 20: mod_base = OTHER; note = 2'-O-methyladenosine-3'-phosphate
  modified_base 21: mod_base = OTHER; note = 2'-deoxy-2'-fluorouridine
tgtggagaaaacaacctaaat

SEQ ID NO: 1013 - RNA, 21 nt, synthetic construct
  source 1..21: mol_type = other RNA
  modified_base 1: mod_base = OTHER; note = 2'-deoxy-2'-fluorouridine-3'-phosphate
  modified_base 2: mod_base = OTHER; note = 2'-O-methylguanosine-3'-phosphate
  modified_base 3: mod_base = OTHER; note = 2'-deoxy-2'-fluoroguanosine-3'-phosphate
  modified_base 4: mod_base = OTHER; note = 2'-O-methyladenosine-3'-phosphate
  modified_base 5: mod_base = OTHER; note = 2'-deoxy-2'-fluoroadenosine-3'-phosphate
  modified_base 6: mod_base = OTHER; note = 2'-O-methylguanosine-3'-phosphate
  modified_base 7: mod_base = OTHER; note = 2'-deoxy-2'-fluoroguanosine-3'-phosphate
  modified_base 8: mod_base = OTHER; note = 2'-O-methyluridine-3'-phosphate
  modified_base 9: mod_base = OTHER; note = 2'-deoxy-2'-fluorouridine-3'-phosphate
  modified_base 10: mod_base = OTHER; note = 2'-deoxy-2'-fluoroadenosine-3'-phosphate
  modified_base 11: mod_base = OTHER; note = 2'-deoxy-2'-fluorouridine-3'-phosphate
  modified_base 12: mod_base = OTHER; note = 2'-O-methyladenosine-3'-phosphate
  modified_base 13: mod_base = OTHER; note = 2'-deoxy-2'-fluorocytidine-3'-phosphate
  modified_base 14: mod_base = OTHER; note = 2'-O-methyluridine-3'-phosphate
  modified_base 15: mod_base = OTHER; note = 2'-deoxy-2'-fluorocytidine-3'-phosphate
  modified_base 16: mod_base = OTHER; note = 2'-O-methyluridine-3'-phosphate
  modified_base 17: mod_base = OTHER; note = 2'-deoxy-2'-fluoroadenosine-3'-phosphate
  modified_base 18: mod_base = OTHER; note = 2'-O-methyluridine-3'-phosphate
  modified_base 19: mod_base = OTHER; note = 2'-deoxy-2'-fluoroadenosine-3'-phosphate
  modified_base 20: mod_base = OTHER; note = 2'-O-methyladenosine-3'-phosphate
  modified_base 21: mod_base = OTHER; note = 2'-deoxy-2'-fluoroadenosine
tggaaggttatactctataaa

SEQ ID NO: 1014 - RNA, 21 nt, synthetic construct
  source 1..21: mol_type = other RNA
  modified_base 1: mod_base = OTHER; note = 2'-deoxy-2'-fluoroadenosine-3'-phosphate
  modified_base 2: mod_base = OTHER; note = 2'-O-methyluridine-3'-phosphate
  modified_base 3: mod_base = OTHER; note = 2'-deoxy-2'-fluoroguanosine-3'-phosphate
  modified_base 4: mod_base = OTHER; note = 2'-O-methyladenosine-3'-phosphate
  modified_base 5: mod_base = OTHER; note = 2'-deoxy-2'-fluoroadenosine-3'-phosphate
  modified_base 6: mod_base = OTHER; note = 2'-O-methylcytidine-3'-phosphate
  modified_base 7: mod_base = OTHER; note = 2'-deoxy-2'-fluorouridine-3'-phosphate
  modified_base 8: mod_base = OTHER; note = 2'-O-methylguanosine-3'-phosphate
  modified_base 9: mod_base = OTHER; note = 2'-deoxy-2'-fluoroadenosine-3'-phosphate
  modified_base 10: mod_base = OTHER; note = 2'-deoxy-2'-fluoroguanosine-3'-phosphate
  modified_base 11: mod_base = OTHER; note = 2'-deoxy-2'-fluoroguanosine-3'-phosphate
  modified_base 12: mod_base = OTHER; note = 2'-O-methylcytidine-3'-phosphate
  modified_base 13: mod_base = OTHER; note = 2'-deoxy-2'-fluoroadenosine-3'-phosphate
  modified_base 14: mod_base = OTHER; note = 2'-O-methyladenosine-3'-phosphate
  modified_base 15: mod_base = OTHER; note = 2'-deoxy-2'-fluoroadenosine-3'-phosphate
  modified_base 16: mod_base = OTHER; note = 2'-O-methyluridine-3'-phosphate
  modified_base 17: mod_base = OTHER; note = 2'-deoxy-2'-fluorouridine-3'-phosphate
  modified_base 18: mod_base = OTHER; note = 2'-O-methyluridine-3'-phosphate
  modified_base 19: mod_base = OTHER; note = 2'-deoxy-2'-fluoroadenosine-3'-phosphate
  modified_base 20: mod_base = OTHER; note = 2'-O-methyladenosine-3'-phosphate
  modified_base 21: mod_base = OTHER; note = 2'-deoxy-2'-fluoroadenosine
atgaactgaggcaaatttaaa

SEQ ID NO: 1015 - RNA, 21 nt, synthetic construct
  source 1..21: mol_type = other RNA
  modified_base 1: mod_base = OTHER; note = 2'-deoxy-2'-fluoroadenosine-3'-phosphate
  modified_base 2: mod_base = OTHER; note = 2'-O-methylguanosine-3'-phosphate
  modified_base 3: mod_base = OTHER; note = 2'-deoxy-2'-fluoroguanosine-3'-phosphate
  modified_base 4: mod_base = OTHER; note = 2'-O-methylcytidine-3'-phosphate
  modified_base 5: mod_base = OTHER; note = 2'-deoxy-2'-fluoroadenosine-3'-phosphate
  modified_base 6: mod_base = OTHER; note = 2'-O-methyladenosine-3'-phosphate
  modified_base 7: mod_base = OTHER; note = 2'-deoxy-2'-fluoroadenosine-3'-phosphate
  modified_base 8: mod_base = OTHER; note = 2'-O-methyluridine-3'-phosphate
  modified_base 9: mod_base = OTHER; note = 2'-deoxy-2'-fluorouridine-3'-phosphate
  modified_base 10: mod_base = OTHER; note = 2'-deoxy-2'-fluorouridine-3'-phosphate
  modified_base 11: mod_base = OTHER; note = 2'-deoxy-2'-fluoroadenosine-3'-phosphate
  modified_base 12: mod_base = OTHER; note = 2'-O-methyladenosine-3'-phosphate
  modified_base 13: mod_base = OTHER; note = 2'-deoxy-2'-fluoroadenosine-3'-phosphate
  modified_base 14: mod_base = OTHER; note = 2'-O-methyladenosine-3'-phosphate
  modified_base 15: mod_base = OTHER; note = 2'-deoxy-2'-fluoroguanosine-3'-phosphate
  modified_base 16: mod_base = OTHER; note = 2'-O-methylguanosine-3'-phosphate
  modified_base 17: mod_base = OTHER; note = 2'-deoxy-2'-fluorocytidine-3'-phosphate
  modified_base 18: mod_base = OTHER; note = 2'-O-methyladenosine-3'-phosphate
  modified_base 19: mod_base = OTHER; note = 2'-deoxy-2'-fluoroadenosine-3'-phosphate
  modified_base 20: mod_base = OTHER; note = 2'-O-methyluridine-3'-phosphate
  modified_base 21: mod_base = OTHER; note = 2'-deoxy-2'-fluoroadenosine
aggcaaatttaaaaggcaata

SEQ ID NO: 1016 - RNA, 21 nt, synthetic construct
  source 1..21: mol_type = other RNA
  modified_base 1: mod_base = OTHER; note = 2'-deoxy-2'-fluoroadenosine-3'-phosphate
  modified_base 2: mod_base = OTHER; note = 2'-O-methyladenosine-3'-phosphate
  modified_base 3: mod_base = OTHER; note = 2'-deoxy-2'-fluoroguanosine-3'-phosphate
  modified_base 4: mod_base = OTHER; note = 2'-O-methyladenosine-3'-phosphate
  modified_base 5: mod_base = OTHER; note = 2'-deoxy-2'-fluorouridine-3'-phosphate
  modified_base 6: mod_base = OTHER; note = 2'-O-methyluridine-3'-phosphate
  modified_base 7: mod_base = OTHER; note = 2'-deoxy-2'-fluorouridine-3'-phosphate
  modified_base 8: mod_base = OTHER; note = 2'-O-methylguanosine-3'-phosphate
  modified_base 9: mod_base = OTHER; note = 2'-deoxy-2'-fluoroguanosine-3'-phosphate
  modified_base 10: mod_base = OTHER; note = 2'-deoxy-2'-fluorouridine-3'-phosphate
  modified_base 11: mod_base = OTHER; note = 2'-deoxy-2'-fluoroguanosine-3'-phosphate
  modified_base 12: mod_base = OTHER; note = 2'-O-methyluridine-3'-phosphate
  modified_base 13: mod_base = OTHER; note = 2'-deoxy-2'-fluorouridine-3'-phosphate
  modified_base 14: mod_base = OTHER; note = 2'-O-methyluridine-3'-phosphate
  modified_base 15: mod_base = OTHER; note = 2'-deoxy-2'-fluorouridine-3'-phosphate
  modified_base 16: mod_base = OTHER; note = 2'-O-methylcytidine-3'-phosphate
  modified_base 17: mod_base = OTHER; note = 2'-deoxy-2'-fluorouridine-3'-phosphate
  modified_base 18: mod_base = OTHER; note = 2'-O-methyladenosine-3'-phosphate
  modified_base 19: mod_base = OTHER; note = 2'-deoxy-2'-fluorocytidine-3'-phosphate
  modified_base 20: mod_base = OTHER; note = 2'-O-methyluridine-3'-phosphate
  modified_base 21: mod_base = OTHER; note = 2'-deoxy-2'-fluorouridine
aagatttggtgttttctactt

SEQ ID NO: 1017 - RNA, 21 nt, synthetic construct
  source 1..21: mol_type = other RNA
  modified_base 1: mod_base = OTHER; note = 2'-deoxy-2'-fluoroadenosine-3'-phosphate
  modified_base 2: mod_base = OTHER; note = 2'-O-methyladenosine-3'-phosphate
  modified_base 3: mod_base = OTHER; note = 2'-deoxy-2'-fluoroadenosine-3'-phosphate
  modified_base 4: mod_base = OTHER; note = 2'-O-methylcytidine-3'-phosphate
  modified_base 5: mod_base = OTHER; note = 2'-deoxy-2'-fluoroadenosine-3'-phosphate
  modified_base 6: mod_base = OTHER; note = 2'-O-methyladenosine-3'-phosphate
  modified_base 7: mod_base = OTHER; note = 2'-deoxy-2'-fluorocytidine-3'-phosphate
  modified_base 8: mod_base = OTHER; note = 2'-O-methylcytidine-3'-phosphate
  modified_base 9: mod_base = OTHER; note = 2'-deoxy-2'-fluorouridine-3'-phosphate
  modified_base 10: mod_base = OTHER; note = 2'-deoxy-2'-fluoroadenosine-3'-phosphate
  modified_base 11: mod_base = OTHER; note = 2'-deoxy-2'-fluoroadenosine-3'-phosphate
  modified_base 12: mod_base = OTHER; note = 2'-O-methyladenosine-3'-phosphate
  modified_base 13: mod_base = OTHER; note = 2'-deoxy-2'-fluorouridine-3'-phosphate
  modified_base 14: mod_base = OTHER; note = 2'-O-methylguanosine-3'-phosphate
  modified_base 15: mod_base = OTHER; note = 2'-deoxy-2'-fluoroguanosine-3'-phosphate
  modified_base 16: mod_base = OTHER; note = 2'-O-methyluridine-3'-phosphate
  modified_base 17: mod_base = OTHER; note = 2'-deoxy-2'-fluoroadenosine-3'-phosphate
  modified_base 18: mod_base = OTHER; note = 2'-O-methyladenosine-3'-phosphate
  modified_base 19: mod_base = OTHER; note = 2'-deoxy-2'-fluoroadenosine-3'-phosphate
  modified_base 20: mod_base = OTHER; note = 2'-O-methyluridine-3'-phosphate
  modified_base 21: mod_base = OTHER; note = 2'-deoxy-2'-fluoroadenosine
aaacaacctaaatggtaaata

SEQ ID NO: 1018 - RNA, 21 nt, synthetic construct
  source 1..21: mol_type = other RNA
  modified_base 1: mod_base = OTHER; note = 2'-deoxy-2'-fluoroadenosine-3'-phosphate
  modified_base 2: mod_base = OTHER; note = 2'-O-methyluridine-3'-phosphate
  modified_base 3: mod_base = OTHER; note = 2'-deoxy-2'-fluoroadenosine-3'-phosphate
  modified_base 4: mod_base = OTHER; note = 2'-O-methylcytidine-3'-phosphate
  modified_base 5: mod_base = OTHER; note = 2'-deoxy-2'-fluorouridine-3'-phosphate
  modified_base 6: mod_base = OTHER; note = 2'-O-methylcytidine-3'-phosphate
  modified_base 7: mod_base = OTHER; note = 2'-deoxy-2'-fluorouridine-3'-phosphate
  modified_base 8: mod_base = OTHER; note = 2'-O-methyladenosine-3'-phosphate
  modified_base 9: mod_base = OTHER; note = 2'-deoxy-2'-fluorouridine-3'-phosphate
  modified_base 10: mod_base = OTHER; note = 2'-deoxy-2'-fluoroadenosine-3'-phosphate
  modified_base 11: mod_base = OTHER; note = 2'-deoxy-2'-fluoroadenosine-3'-phosphate
  modified_base 12: mod_base = OTHER; note = 2'-O-methyladenosine-3'-phosphate
  modified_base 13: mod_base = OTHER; note = 2'-deoxy-2'-fluoroadenosine-3'-phosphate
  modified_base 14: mod_base = OTHER; note = 2'-O-methyluridine-3'-phosphate
  modified_base 15: mod_base = OTHER; note = 2'-deoxy-2'-fluorocytidine-3'-phosphate
  modified_base 16: mod_base = OTHER; note = 2'-O-methyladenosine-3'-phosphate
  modified_base 17: mod_base = OTHER; note = 2'-deoxy-2'-fluoroadenosine-3'-phosphate
  modified_base 18: mod_base = OTHER; note = 2'-O-methylcytidine-3'-phosphate
  modified_base 19: mod_base = OTHER; note = 2'-deoxy-2'-fluorocytidine-3'-phosphate
  modified_base 20: mod_base = OTHER; note = 2'-O-methyladenosine-3'-phosphate
  modified_base 21: mod_base = OTHER; note = 2'-deoxy-2'-fluoroadenosine
atactctataaaatcaaccaa

SEQ ID NO: 1019 - RNA, 21 nt, synthetic construct
  source 1..21: mol_type = other RNA
  modified_base 1: mod_base = OTHER; note = 2'-deoxy-2'-fluorouridine-3'-phosphate
  modified_base 2: mod_base = OTHER; note = 2'-O-methylguanosine-3'-phosphate
  modified_base 3: mod_base = OTHER; note = 2'-deoxy-2'-fluoroadenosine-3'-phosphate
  modified_base 4: mod_base = OTHER; note = 2'-O-methyladenosine-3'-phosphate
  modified_base 5: mod_base = OTHER; note = 2'-deoxy-2'-fluorocytidine-3'-phosphate
  modified_base 6: mod_base = OTHER; note = 2'-O-methyluridine-3'-phosphate
  modified_base 7: mod_base = OTHER; note = 2'-deoxy-2'-fluoroguanosine-3'-phosphate
  modified_base 8: mod_base = OTHER; note = 2'-O-methyladenosine-3'-phosphate
  modified_base 9: mod_base = OTHER; note = 2'-deoxy-2'-fluoroguanosine-3'-phosphate
  modified_base 10: mod_base = OTHER; note = 2'-deoxy-2'-fluoroguanosine-3'-phosphate
  modified_base 11: mod_base = OTHER; note = 2'-deoxy-2'-fluorocytidine-3'-phosphate
  modified_base 12: mod_base = OTHER; note = 2'-O-methyladenosine-3'-phosphate
  modified_base 13: mod_base = OTHER; note = 2'-deoxy-2'-fluoroadenosine-3'-phosphate
  modified_base 14: mod_base = OTHER; note = 2'-O-methyladenosine-3'-phosphate
  modified_base 15: mod_base = OTHER; note = 2'-deoxy-2'-fluorouridine-3'-phosphate
  modified_base 16: mod_base = OTHER; note = 2'-O-methyluridine-3'-phosphate
  modified_base 17: mod_base = OTHER; note = 2'-deoxy-2'-fluorouridine-3'-phosphate
  modified_base 18: mod_base = OTHER; note = 2'-O-methyladenosine-3'-phosphate
  modified_base 19: mod_base = OTHER; note = 2'-deoxy-2'-fluoroadenosine-3'-phosphate
  modified_base 20: mod_base = OTHER; note = 2'-O-methyladenosine-3'-phosphate
  modified_base 21: mod_base = OTHER; note = 2'-deoxy-2'-fluoroadenosine
tgaactgaggcaaatttaaaa

SEQ ID NO: 1020 - RNA, 21 nt, synthetic construct
  source 1..21: mol_type = other RNA
  modified_base 1: mod_base = OTHER; note = 2'-deoxy-2'-fluoroguanosine-3'-phosphate
  modified_base 2: mod_base = OTHER; note = 2'-O-methylguanosine-3'-phosphate
  modified_base 3: mod_base = OTHER; note = 2'-deoxy-2'-fluorocytidine-3'-phosphate
  modified_base 4: mod_base = OTHER; note = 2'-O-methyladenosine-3'-phosphate
  modified_base 5: mod_base = OTHER; note = 2'-deoxy-2'-fluoroadenosine-3'-phosphate
  modified_base 6: mod_base = OTHER; note = 2'-O-methyladenosine-3'-phosphate
  modified_base 7: mod_base = OTHER; note = 2'-deoxy-2'-fluorouridine-3'-phosphate
  modified_base 8: mod_base = OTHER; note = 2'-O-methyluridine-3'-phosphate
  modified_base 9: mod_base = OTHER; note = 2'-deoxy-2'-fluorouridine-3'-phosphate
  modified_base 10: mod_base = OTHER; note = 2'-deoxy-2'-fluoroadenosine-3'-phosphate
  modified_base 11: mod_base = OTHER; note = 2'-deoxy-2'-fluoroadenosine-3'-phosphate
  modified_base 12: mod_base = OTHER; note = 2'-O-methyladenosine-3'-phosphate
  modified_base 13: mod_base = OTHER; note = 2'-deoxy-2'-fluoroadenosine-3'-phosphate
  modified_base 14: mod_base = OTHER; note = 2'-O-methylguanosine-3'-phosphate
  modified_base 15: mod_base = OTHER; note = 2'-deoxy-2'-fluoroguanosine-3'-phosphate
  modified_base 16: mod_base = OTHER; note = 2'-O-methylcytidine-3'-phosphate
  modified_base 17: mod_base = OTHER; note = 2'-deoxy-2'-fluoroadenosine-3'-phosphate
  modified_base 18: mod_base = OTHER; note = 2'-O-methyladenosine-3'-phosphate
  modified_base 19: mod_base = OTHER; note = 2'-deoxy-2'-fluorouridine-3'-phosphate
  modified_base 20: mod_base = OTHER; note = 2'-O-methyladenosine-3'-phosphate
  modified_base 21: mod_base = OTHER; note = 2'-deoxy-2'-fluoroadenosine
ggcaaatttaaaaggcaataa

SEQ ID NO: 1021 - RNA, 21 nt, synthetic construct
  source 1..21: mol_type = other RNA
  modified_base 1: mod_base = OTHER; note = 2'-deoxy-2'-fluorouridine-3'-phosphate
  modified_base 2: mod_base = OTHER; note = 2'-O-methyluridine-3'-phosphate
  modified_base 3: mod_base = OTHER; note = 2'-deoxy-2'-fluorouridine-3'-phosphate
  modified_base 4: mod_base = OTHER; note = 2'-O-methyluridine-3'-phosphate
  modified_base 5: mod_base = OTHER; note = 2'-deoxy-2'-fluorocytidine-3'-phosphate
  modified_base 6: mod_base = OTHER; note = 2'-O-methyluridine-3'-phosphate
  modified_base 7: mod_base = OTHER; note = 2'-deoxy-2'-fluoroadenosine-3'-phosphate
  modified_base 8: mod_base = OTHER; note = 2'-O-methylcytidine-3'-phosphate
  modified_base 9: mod_base = OTHER; note = 2'-deoxy-2'-fluorouridine-3'-phosphate
  modified_base 10: mod_base = OTHER; note = 2'-deoxy-2'-fluorouridine-3'-phosphate
  modified_base 11: mod_base = OTHER; note = 2'-deoxy-2'-fluoroguanosine-3'-phosphate
  modified_base 12: mod_base = OTHER; note = 2'-O-methylguanosine-3'-phosphate
  modified_base 13: mod_base = OTHER; note = 2'-deoxy-2'-fluoroguanosine-3'-phosphate
  modified_base 14: mod_base = OTHER; note = 2'-O-methyladenosine-3'-phosphate
  modified_base 15: mod_base = OTHER; note = 2'-deoxy-2'-fluorouridine-3'-phosphate
  modified_base 16: mod_base = OTHER; note = 2'-O-methylcytidine-3'-phosphate
  modified_base 17: mod_base = OTHER; note = 2'-deoxy-2'-fluoroadenosine-3'-phosphate
  modified_base 18: mod_base = OTHER; note = 2'-O-methylcytidine-3'-phosphate
  modified_base 19: mod_base = OTHER; note = 2'-deoxy-2'-fluoroadenosine-3'-phosphate
  modified_base 20: mod_base = OTHER; note = 2'-O-methyladenosine-3'-phosphate
  modified_base 21: mod_base = OTHER; note = 2'-deoxy-2'-fluoroadenosine
ttttctacttgggatcacaaa

SEQ ID NO: 1022 - RNA, 21 nt, synthetic construct
  source 1..21: mol_type = other RNA
  modified_base 1: mod_base = OTHER; note = 2'-deoxy-2'-fluoroadenosine-3'-phosphate
  modified_base 2: mod_base = OTHER; note = 2'-O-methyladenosine-3'-phosphate
  modified_base 3: mod_base = OTHER; note = 2'-deoxy-2'-fluorocytidine-3'-phosphate
  modified_base 4: mod_base = OTHER; note = 2'-O-methyladenosine-3'-phosphate
  modified_base 5: mod_base = OTHER; note = 2'-deoxy-2'-fluoroadenosine-3'-phosphate
  modified_base 6: mod_base = OTHER; note = 2'-O-methylcytidine-3'-phosphate
  modified_base 7: mod_base = OTHER; note = 2'-deoxy-2'-fluorocytidine-3'-phosphate
  modified_base 8: mod_base = OTHER; note = 2'-O-methyluridine-3'-phosphate
  modified_base 9: mod_base = OTHER; note = 2'-deoxy-2'-fluoroadenosine-3'-phosphate
  modified_base 10: mod_base = OTHER; note = 2'-deoxy-2'-fluoroadenosine-3'-phosphate
  modified_base 11: mod_base = OTHER; note = 2'-deoxy-2'-fluoroadenosine-3'-phosphate
  modified_base 12: mod_base = OTHER; note = 2'-O-methyluridine-3'-phosphate
  modified_base 13: mod_base = OTHER; note = 2'-deoxy-2'-fluoroguanosine-3'-phosphate
  modified_base 14: mod_base = OTHER; note = 2'-O-methylguanosine-3'-phosphate
  modified_base 15: mod_base = OTHER; note = 2'-deoxy-2'-fluorouridine-3'-phosphate
  modified_base 16: mod_base = OTHER; note = 2'-O-methyladenosine-3'-phosphate
  modified_base 17: mod_base = OTHER; note = 2'-deoxy-2'-fluoroadenosine-3'-phosphate
  modified_base 18: mod_base = OTHER; note = 2'-O-methyladenosine-3'-phosphate
  modified_base 19: mod_base = OTHER; note = 2'-deoxy-2'-fluorouridine-3'-phosphate
  modified_base 20: mod_base = OTHER; note = 2'-O-methyladenosine-3'-phosphate
  modified_base 21: mod_base = OTHER; note = 2'-deoxy-2'-fluorouridine
aacaacctaaatggtaaatat

SEQ ID NO: 1023 - RNA, 21 nt, synthetic construct
  source 1..21: mol_type = other RNA
  modified_base 1: mod_base = OTHER; note = 2'-deoxy-2'-fluorouridine-3'-phosphate
  modified_base 2: mod_base = OTHER; note = 2'-O-methyladenosine-3'-phosphate
  modified_base 3: mod_base = OTHER; note = 2'-deoxy-2'-fluorocytidine-3'-phosphate
  modified_base 4: mod_base = OTHER; note = 2'-O-methyluridine-3'-phosphate
  modified_base 5: mod_base = OTHER; note = 2'-deoxy-2'-fluorocytidine-3'-phosphate
  modified_base 6: mod_base = OTHER; note = 2'-O-methyluridine-3'-phosphate
  modified_base 7: mod_base = OTHER; note = 2'-deoxy-2'-fluoroadenosine-3'-phosphate
  modified_base 8: mod_base = OTHER; note = 2'-O-methyluridine-3'-phosphate
  modified_base 9: mod_base = OTHER; note = 2'-deoxy-2'-fluoroadenosine-3'-phosphate
  modified_base 10: mod_base = OTHER; note = 2'-deoxy-2'-fluoroadenosine-3'-phosphate
  modified_base 11: mod_base = OTHER; note = 2'-deoxy-2'-fluoroadenosine-3'-phosphate
  modified_base 12: mod_base = OTHER; note = 2'-O-methyladenosine-3'-phosphate
  modified_base 13: mod_base = OTHER; note = 2'-deoxy-2'-fluorouridine-3'-phosphate
  modified_base 14: mod_base = OTHER; note = 2'-O-methylcytidine-3'-phosphate
  modified_base 15: mod_base = OTHER; note = 2'-deoxy-2'-fluoroadenosine-3'-phosphate
  modified_base 16: mod_base = OTHER; note = 2'-O-methyladenosine-3'-phosphate
  modified_base 17: mod_base = OTHER; note = 2'-deoxy-2'-fluorocytidine-3'-phosphate
  modified_base 18: mod_base = OTHER; note = 2'-O-methylcytidine-3'-phosphate
  modified_base 19: mod_base = OTHER; note = 2'-deoxy-2'-fluoroadenosine-3'-phosphate
  modified_base 20: mod_base = OTHER; note = 2'-O-methyladenosine-3'-phosphate
  modified_base 21: mod_base = OTHER; note = 2'-deoxy-2'-fluoroadenosine
tactctataaaatcaaccaaa

SEQ ID NO: 1024 - RNA, 21 nt, synthetic construct
  source 1..21: mol_type = other RNA
  modified_base 1: mod_base = OTHER; note = 2'-deoxy-2'-fluoroguanosine-3'-phosphate
  modified_base 2: mod_base = OTHER; note = 2'-O-methyladenosine-3'-phosphate
  modified_base 3: mod_base = OTHER; note = 2'-deoxy-2'-fluoroadenosine-3'-phosphate
  modified_base 4: mod_base = OTHER; note = 2'-O-methylcytidine-3'-phosphate
  modified_base 5: mod_base = OTHER; note = 2'-deoxy-2'-fluorouridine-3'-phosphate
  modified_base 6: mod_base = OTHER; note = 2'-O-methylguanosine-3'-phosphate
  modified_base 7: mod_base = OTHER; note = 2'-deoxy-2'-fluoroadenosine-3'-phosphate
  modified_base 8: mod_base = OTHER; note = 2'-O-methylguanosine-3'-phosphate
  modified_base 9: mod_base = OTHER; note = 2'-deoxy-2'-fluoroguanosine-3'-phosphate
  modified_base 10: mod_base = OTHER; note = 2'-deoxy-2'-fluorocytidine-3'-phosphate
  modified_base 11: mod_base = OTHER; note = 2'-deoxy-2'-fluoroadenosine-3'-phosphate
  modified_base 12: mod_base = OTHER; note = 2'-O-methyladenosine-3'-phosphate
  modified_base 13: mod_base = OTHER; note = 2'-deoxy-2'-fluoroadenosine-3'-phosphate
  modified_base 14: mod_base = OTHER; note = 2'-O-methyluridine-3'-phosphate
  modified_base 15: mod_base = OTHER; note = 2'-deoxy-2'-fluorouridine-3'-phosphate
  modified_base 16: mod_base = OTHER; note = 2'-O-methyluridine-3'-phosphate
  modified_base 17: mod_base = OTHER; note = 2'-deoxy-2'-fluoroadenosine-3'-phosphate
  modified_base 18: mod_base = OTHER; note = 2'-O-methyladenosine-3'-phosphate
  modified_base 19: mod_base = OTHER; note = 2'-deoxy-2'-fluoroadenosine-3'-phosphate
  modified_base 20: mod_base = OTHER; note = 2'-O-methyladenosine-3'-phosphate
  modified_base 21: mod_base = OTHER; note = 2'-deoxy-2'-fluoroadenosine
gaactgaggcaaatttaaaaa

SEQ ID NO: 1025 - RNA, 21 nt, synthetic construct
  source 1..21: mol_type = other RNA
  modified_base 1: mod_base = OTHER; note = 2'-deoxy-2'-fluorocytidine-3'-phosphate
  modified_base 2: mod_base = OTHER; note = 2'-O-methyladenosine-3'-phosphate
  modified_base 3: mod_base = OTHER; note = 2'-deoxy-2'-fluoroguanosine-3'-phosphate
  modified_base 4: mod_base = OTHER; note = 2'-O-methyladenosine-3'-phosphate
  modified_base 5: mod_base = OTHER; note = 2'-deoxy-2'-fluoroguanosine-3'-phosphate
  modified_base 6: mod_base = OTHER; note = 2'-O-methyluridine-3'-phosphate
  modified_base 7: mod_base = OTHER; note = 2'-deoxy-2'-fluoroadenosine-3'-phosphate
  modified_base 8: mod_base = OTHER; note = 2'-O-methyluridine-3'-phosphate
  modified_base 9: mod_base = OTHER; note = 2'-deoxy-2'-fluoroguanosine-3'-phosphate
  modified_base 10: mod_base = OTHER; note = 2'-deoxy-2'-fluorouridine-3'-phosphate
  modified_base 11: mod_base = OTHER; note = 2'-deoxy-2'-fluoroguanosine-3'-phosphate
  modified_base 12: mod_base = OTHER; note = 2'-O-methyluridine-3'-phosphate
  modified_base 13: mod_base = OTHER; note = 2'-deoxy-2'-fluoroadenosine-3'-phosphate
  modified_base 14: mod_base = OTHER; note = 2'-O-methyladenosine-3'-phosphate
  modified_base 15: mod_base = OTHER; note = 2'-deoxy-2'-fluoroadenosine-3'-phosphate
  modified_base 16: mod_base = OTHER; note = 2'-O-methyladenosine-3'-phosphate
  modified_base 17: mod_base = OTHER; note = 2'-deoxy-2'-fluoroadenosine-3'-phosphate
  modified_base 18: mod_base = OTHER; note = 2'-O-methyluridine-3'-phosphate
  modified_base 19: mod_base = OTHER; note = 2'-deoxy-2'-fluorocytidine-3'-phosphate
  modified_base 20: mod_base = OTHER; note = 2'-O-methyluridine-3'-phosphate
  modified_base 21: mod_base = OTHER; note = 2'-deoxy-2'-fluorouridine
cagagtatgtgtaaaaatctt

SEQ ID NO: 1026 - RNA, 23 nt, synthetic construct
  source 1..23: mol_type = other RNA
  modified_base 1: mod_base = OTHER; note = 2'-O-methyladenosine-3'-phosphate
  modified_base 2: mod_base = OTHER; note = 2'-deoxy-2'-fluoroadenosine-3'-phosphate
  modified_base 3: mod_base = OTHER; note = 2'-O-methyladenosine-3'-phosphate
  modified_base 4: mod_base = OTHER; note = 2'-deoxy-2'-fluoroguanosine-3'-phosphate
  modified_base 5: mod_base = OTHER; note = 2'-O-methyladenosine-3'-phosphate
  modified_base 6: mod_base = OTHER; note = 2'-deoxy-2'-fluoroadenosine-3'-phosphate
  modified_base 7: mod_base = OTHER; note = 2'-O-methylguanosine-3'-phosphate
  modified_base 8: mod_base = OTHER; note = 2'-deoxy-2'-fluoroguanosine-3'-phosphate
  modified_base 9: mod_base = OTHER; note = 2'-O-methyladenosine-3'-phosphate
  modified_base 10: mod_base = OTHER; note = 2'-deoxy-2'-fluoroguanosine-3'-phosphate
  modified_base 11: mod_base = OTHER; note = 2'-O-methylcytidine-3'-phosphate
  modified_base 12: mod_base = OTHER; note = 2'-O-methyluridine-3'-phosphate
  modified_base 13: mod_base = OTHER; note = 2'-O-methyluridine-3'-phosphate
  modified_base 14: mod_base = OTHER; note = 2'-deoxy-2'-fluoroadenosine-3'-phosphate
  modified_base 15: mod_base = OTHER; note = 2'-O-methyladenosine-3'-phosphate
  modified_base 16: mod_base = OTHER; note = 2'-deoxy-2'-fluorouridine-3'-phosphate
  modified_base 17: mod_base = OTHER; note = 2'-O-methyluridine-3'-phosphate
  modified_base 18: mod_base = OTHER; note = 2'-deoxy-2'-fluoroguanosine-3'-phosphate
  modified_base 19: mod_base = OTHER; note = 2'-O-methyluridine-3'-phosphate
  modified_base 20: mod_base = OTHER; note = 2'-deoxy-2'-fluoroguanosine-3'-phosphate
  modified_base 21: mod_base = OTHER; note = 2'-O-methyladenosine-3'-phosphorothioate
  modified_base 22: mod_base = OTHER; note = 2'-deoxy-2'-fluoroadenosine-3'-phosphorothioate
  modified_base 23: mod_base = OTHER; note = 2'-O-methylcytidine
aaagaaggagcttaattgtgaac

SEQ ID NO: 1027 - RNA, 23 nt, synthetic construct
  source 1..23: mol_type = other RNA
  modified_base 1: mod_base = OTHER; note = 2'-O-methyladenosine-3'-phosphate
  modified_base 2: mod_base = OTHER; note = 2'-deoxy-2'-fluoroadenosine-3'-phosphate
  modified_base 3: mod_base = OTHER; note = 2'-O-methyladenosine-3'-phosphate
  modified_base 4: mod_base = OTHER; note = 2'-deoxy-2'-fluorouridine-3'-phosphate
  modified_base 5: mod_base = OTHER; note = 2'-O-methyladenosine-3'-phosphate
  modified_base 6: mod_base = OTHER; note = 2'-deoxy-2'-fluoroadenosine-3'-phosphate
  modified_base 7: mod_base = OTHER; note = 2'-O-methylcytidine-3'-phosphate
  modified_base 8: mod_base = OTHER; note = 2'-deoxy-2'-fluorouridine-3'-phosphate
  modified_base 9: mod_base = OTHER; note = 2'-O-methyladenosine-3'-phosphate
  modified_base 10: mod_base = OTHER; note = 2'-deoxy-2'-fluoroguanosine-3'-phosphate
  modified_base 11: mod_base = OTHER; note = 2'-O-methyladenosine-3'-phosphate
  modified_base 12: mod_base = OTHER; note = 2'-O-methylguanosine-3'-phosphate
  modified_base 13: mod_base = OTHER; note = 2'-O-methylguanosine-3'-phosphate
  modified_base 14: mod_base = OTHER; note = 2'-deoxy-2'-fluoroadenosine-3'-phosphate
  modified_base 15: mod_base = OTHER; note = 2'-O-methyladenosine-3'-phosphate
  modified_base 16: mod_base = OTHER; note = 2'-deoxy-2'-fluorocytidine-3'-phosphate
  modified_base 17: mod_base = OTHER; note = 2'-O-methyladenosine-3'-phosphate
  modified_base 18: mod_base = OTHER; note = 2'-deoxy-2'-fluoroadenosine-3'-phosphate
  modified_base 19: mod_base = OTHER; note = 2'-O-methyluridine-3'-phosphate
  modified_base 20: mod_base = OTHER; note = 2'-deoxy-2'-fluoroadenosine-3'-phosphate
  modified_base 21: mod_base = OTHER; note = 2'-O-methyladenosine-3'-phosphorothioate
  modified_base 22: mod_base = OTHER; note = 2'-deoxy-2'-fluoroadenosine-3'-phosphorothioate
  modified_base 23: mod_base = OTHER; note = 2'-O-methyladenosine
aaataactagaggaacaataaaa

SEQ ID NO: 1028 - RNA, 23 nt, synthetic construct
  source 1..23: mol_type = other RNA
  modified_base 1: mod_base = OTHER; note = 2'-O-methyluridine-3'-phosphate
  modified_base 2: mod_base = OTHER; note = 2'-deoxy-2'-fluorouridine-3'-phosphate
  modified_base 3: mod_base = OTHER; note = 2'-O-methyluridine-3'-phosphate
  modified_base 4: mod_base = OTHER; note = 2'-deoxy-2'-fluorouridine-3'-phosphate
  modified_base 5: mod_base = OTHER; note = 2'-O-methyladenosine-3'-phosphate
  modified_base 6: mod_base = OTHER; note = 2'-deoxy-2'-fluorocytidine-3'-phosphate
  modified_base 7: mod_base = OTHER; note = 2'-O-methyladenosine-3'-phosphate
  modified_base 8: mod_base = OTHER; note = 2'-deoxy-2'-fluorouridine-3'-phosphate
  modified_base 9: mod_base = OTHER; note = 2'-O-methylcytidine-3'-phosphate
  modified_base 10: mod_base = OTHER; note = 2'-deoxy-2'-fluoroguanosine-3'-phosphate
  modified_base 11: mod_base = OTHER; note = 2'-O-methyluridine-3'-phosphate
  modified_base 12: mod_base = OTHER; note = 2'-O-methylcytidine-3'-phosphate
  modified_base 13: mod_base = OTHER; note = 2'-O-methyluridine-3'-phosphate
  modified_base 14: mod_base = OTHER; note = 2'-deoxy-2'-fluoroadenosine-3'-phosphate
  modified_base 15: mod_base = OTHER; note = 2'-O-methyladenosine-3'-phosphate
  modified_base 16: mod_base = OTHER; note = 2'-deoxy-2'-fluorocytidine-3'-phosphate
  modified_base 17: mod_base = OTHER; note = 2'-O-methyladenosine-3'-phosphate
  modified_base 18: mod_base = OTHER; note = 2'-deoxy-2'-fluorouridine-3'-phosphate
  modified_base 19: mod_base = OTHER; note = 2'-O-methyladenosine-3'-phosphate
  modified_base 20: mod_base = OTHER; note = 2'-deoxy-2'-fluoroguanosine-3'-phosphate
  modified_base 21: mod_base = OTHER; note = 2'-O-methylcytidine-3'-phosphorothioate
  modified_base 22: mod_base = OTHER; note = 2'-deoxy-2'-fluoroadenosine-3'-phosphorothioate
  modified_base 23: mod_base = OTHER; note = 2'-O-methyladenosine
ttttacatcgtctaacatagcaa

SEQ ID NO: 1029 - RNA, 23 nt, synthetic construct
  source 1..23: mol_type = other RNA
  modified_base 1: mod_base = OTHER; note = 2'-O-methyladenosine-3'-phosphate
  modified_base 2: mod_base = OTHER; note = 2'-deoxy-2'-fluoroadenosine-3'-phosphate
  modified_base 3: mod_base = OTHER; note = 2'-O-methyladenosine-3'-phosphate
  modified_base 4: mod_base = OTHER; note = 2'-deoxy-2'-fluoroguanosine-3'-phosphate
  modified_base 5: mod_base = OTHER; note = 2'-O-methyluridine-3'-phosphate
  modified_base 6: mod_base = OTHER; note = 2'-deoxy-2'-fluorocytidine-3'-phosphate
  modified_base 7: mod_base = OTHER; note = 2'-O-methyluridine-3'-phosphate
  modified_base 8: mod_base = OTHER; note = 2'-deoxy-2'-fluorouridine-3'-phosphate
  modified_base 9: mod_base = OTHER; note = 2'-O-methyluridine-3'-phosphate
  modified_base 10: mod_base = OTHER; note = 2'-deoxy-2'-fluoroadenosine-3'-phosphate
  modified_base 11: mod_base = OTHER; note = 2'-O-methyladenosine-3'-phosphate
  modified_base 12: mod_base = OTHER; note = 2'-O-methylguanosine-3'-phosphate
  modified_base 13: mod_base = OTHER; note = 2'-O-methyladenosine-3'-phosphate
  modified_base 14: mod_base = OTHER; note = 2'-deoxy-2'-fluorocytidine-3'-phosphate
  modified_base 15: mod_base = OTHER; note = 2'-O-methylcytidine-3'-phosphate
  modified_base 16: mod_base = OTHER; note = 2'-deoxy-2'-fluoroadenosine-3'-phosphate
  modified_base 17: mod_base = OTHER; note = 2'-O-methyluridine-3'-phosphate
  modified_base 18: mod_base = OTHER; note = 2'-deoxy-2'-fluoroguanosine-3'-phosphate
  modified_base 19: mod_base = OTHER; note = 2'-O-methyluridine-3'-phosphate
  modified_base 20: mod_base = OTHER; note = 2'-deoxy-2'-fluorocytidine-3'-phosphate
  modified_base 21: mod_base = OTHER; note = 2'-O-methylcytidine-3'-phosphorothioate
  modified_base 22: mod_base = OTHER; note = 2'-deoxy-2'-fluorocytidine-3'-phosphorothioate
  modified_base 23: mod_base = OTHER; note = 2'-O-methyladenosine
aaagtctttaagaccatgtccca

SEQ ID NO: 1030 - RNA, 23 nt, synthetic construct
  source 1..23: mol_type = other RNA
  modified_base 1: mod_base = OTHER; note = 2'-O-methyladenosine-3'-phosphate
  modified_base 2: mod_base = OTHER; note = 2'-deoxy-2'-fluorouridine-3'-phosphate
  modified_base 3: mod_base = OTHER; note = 2'-O-methylcytidine-3'-phosphate
  modified_base 4: mod_base = OTHER; note = 2'-deoxy-2'-fluoroadenosine-3'-phosphate
  modified_base 5: mod_base = OTHER; note = 2'-O-methyladenosine-3'-phosphate
  modified_base 6: mod_base = OTHER; note = 2'-deoxy-2'-fluoroadenosine-3'-phosphate
  modified_base 7: mod_base = OTHER; note = 2'-O-methyluridine-3'-phosphate
  modified_base 8: mod_base = OTHER; note = 2'-deoxy-2'-fluoroadenosine-3'-phosphate
  modified_base 9: mod_base = OTHER; note = 2'-O-methyluridine-3'-phosphate
  modified_base 10: mod_base = OTHER; note = 2'-deoxy-2'-fluoroguanosine-3'-phosphate
  modified_base 11: mod_base = OTHER; note = 2'-O-methyluridine-3'-phosphate
  modified_base 12: mod_base = OTHER; note = 2'-O-methyluridine-3'-phosphate
  modified_base 13: mod_base = OTHER; note = 2'-O-methylguanosine-3'-phosphate
  modified_base 14: mod_base = OTHER; note = 2'-deoxy-2'-fluoroadenosine-3'-phosphate
  modified_base 15: mod_base = OTHER; note = 2'-O-methylguanosine-3'-phosphate
  modified_base 16: mod_base = OTHER; note = 2'-deoxy-2'-fluorouridine-3'-phosphate
  modified_base 17: mod_base = OTHER; note = 2'-O-methyluridine-3'-phosphate
  modified_base 18: mod_base = OTHER; note = 2'-deoxy-2'-fluorouridine-3'-phosphate
  modified_base 19: mod_base = OTHER; note = 2'-O-methyluridine-3'-phosphate
  modified_base 20: mod_base = OTHER; note = 2'-deoxy-2'-fluorouridine-3'-phosphate
  modified_base 21: mod_base = OTHER; note = 2'-O-methylguanosine-3'-phosphorothioate
  modified_base 22: mod_base = OTHER; note = 2'-deoxy-2'-fluoroadenosine-3'-phosphorothioate
  modified_base 23: mod_base = OTHER; note = 2'-O-methyladenosine
atcaaatatgttgagtttttgaa

SEQ ID NO: 1031 - RNA, 23 nt, synthetic construct
  source 1..23: mol_type = other RNA
  modified_base 1: mod_base = OTHER; note = 2'-O-methyluridine-3'-phosphate
  modified_base 2: mod_base = OTHER; note = 2'-deoxy-2'-fluorouridine-3'-phosphate
  modified_base 3: mod_base = OTHER; note = 2'-O-methylcytidine-3'-phosphate
  modified_base 4: mod_base = OTHER; note = 2'-deoxy-2'-fluorouridine-3'-phosphate
  modified_base 5: mod_base = OTHER; note = 2'-O-methyluridine-3'-phosphate
  modified_base 6: mod_base = OTHER; note = 2'-deoxy-2'-fluorocytidine-3'-phosphate
  modified_base 7: mod_base = OTHER; note = 2'-O-methyluridine-3'-phosphate
  modified_base 8: mod_base = OTHER; note = 2'-deoxy-2'-fluorouridine-3'-phosphate
  modified_base 9: mod_base = OTHER; note = 2'-O-methyluridine-3'-phosphate
  modified_base 10: mod_base = OTHER; note = 2'-deoxy-2'-fluoroguanosine-3'-phosphate
  modified_base 11: mod_base = OTHER; note = 2'-O-methyladenosine-3'-phosphate
  modified_base 12: mod_base = OTHER; note = 2'-O-methyluridine-3'-phosphate
  modified_base 13: mod_base = OTHER; note = 2'-O-methyluridine-3'-phosphate
  modified_base 14: mod_base = OTHER; note = 2'-deoxy-2'-fluorouridine-3'-phosphate
  modified_base 15: mod_base = OTHER; note = 2'-O-methylcytidine-3'-phosphate
  modified_base 16: mod_base = OTHER; note = 2'-deoxy-2'-fluoroadenosine-3'-phosphate
  modified_base 17: mod_base = OTHER; note = 2'-O-methylcytidine-3'-phosphate
  modified_base 18: mod_base = OTHER; note = 2'-deoxy-2'-fluorouridine-3'-phosphate
  modified_base 19: mod_base = OTHER; note = 2'-O-methylguanosine-3'-phosphate
  modified_base 20: mod_base = OTHER; note = 2'-deoxy-2'-fluoroguanosine-3'-phosphate
  modified_base 21: mod_base = OTHER; note = 2'-O-methyluridine-3'-phosphorothioate
  modified_base 22: mod_base = OTHER; note = 2'-deoxy-2'-fluorouridine-3'-phosphorothioate
  modified_base 23: mod_base = OTHER; note = 2'-O-methyluridine
ttcttctttgatttcactggttt

SEQ ID NO: 1032 - RNA, 23 nt, synthetic construct
  source 1..23: mol_type = other RNA
  modified_base 1: mod_base = OTHER; note = 2'-O-methyladenosine-3'-phosphate
  modified_base 2: mod_base = OTHER; note = 2'-deoxy-2'-fluoroadenosine-3'-phosphate
  modified_base 3: mod_base = OTHER; note = 2'-O-methyladenosine-3'-phosphate
  modified_base 4: mod_base = OTHER; note = 2'-deoxy-2'-fluoroadenosine-3'-phosphate
  modified_base 5: mod_base = OTHER; note = 2'-O-methylguanosine-3'-phosphate
  modified_base 6: mod_base = OTHER; note = 2'-deoxy-2'-fluoroadenosine-3'-phosphate
  modified_base 7: mod_base = OTHER; note = 2'-O-methyladenosine-3'-phosphate
  modified_base 8: mod_base = OTHER; note = 2'-deoxy-2'-fluoroguanosine-3'-phosphate
  modified_base 9: mod_base = OTHER; note = 2'-O-methylguanosine-3'-phosphate
  modified_base 10: mod_base = OTHER; note = 2'-deoxy-2'-fluoroadenosine-3'-phosphate
  modified_base 11: mod_base = OTHER; note = 2'-O-methylguanosine-3'-phosphate
  modified_base 12: mod_base = OTHER; note = 2'-O-methylcytidine-3'-phosphate
  modified_base 13: mod_base = OTHER; note = 2'-O-methyluridine-3'-phosphate
  modified_base 14: mod_base = OTHER; note = 2'-deoxy-2'-fluorouridine-3'-phosphate
  modified_base 15: mod_base = OTHER; note = 2'-O-methyladenosine-3'-phosphate
  modified_base 16: mod_base = OTHER; note = 2'-deoxy-2'-fluoroadenosine-3'-phosphate
  modified_base 17: mod_base = OTHER; note = 2'-O-methyluridine-3'-phosphate
  modified_base 18: mod_base = OTHER; note = 2'-deoxy-2'-fluorouridine-3'-phosphate
  modified_base 19: mod_base = OTHER; note = 2'-O-methylguanosine-3'-phosphate
  modified_base 20: mod_base = OTHER; note = 2'-deoxy-2'-fluorouridine-3'-phosphate
  modified_base 21: mod_base = OTHER; note = 2'-O-methylguanosine-3'-phosphorothioate
  modified_base 22: mod_base = OTHER; note = 2'-deoxy-2'-fluoroadenosine-3'-phosphorothioate
  modified_base 23: mod_base = OTHER; note = 2'-O-methyladenosine
aaaagaaggagcttaattgtgaa

SEQ ID NO: 1033 - RNA, 23 nt, synthetic construct
  source 1..23: mol_type = other RNA
  modified_base 1: mod_base = OTHER; note = 2'-O-methyluridine-3'-phosphate
  modified_base 2: mod_base = OTHER; note = 2'-deoxy-2'-fluorouridine-3'-phosphate
  modified_base 3: mod_base = OTHER; note = 2'-O-methyluridine-3'-phosphate
  modified_base 4: mod_base = OTHER; note = 2'-deoxy-2'-fluorouridine-3'-phosphate
  modified_base 5: mod_base = OTHER; note = 2'-O-methyluridine-3'-phosphate
  modified_base 6: mod_base = OTHER; note = 2'-deoxy-2'-fluoroadenosine-3'-phosphate
  modified_base 7: mod_base = OTHER; note = 2'-O-methylcytidine-3'-phosphate
  modified_base 8: mod_base = OTHER; note = 2'-deoxy-2'-fluoroadenosine-3'-phosphate
  modified_base 9: mod_base = OTHER; note = 2'-O-methyluridine-3'-phosphate
  modified_base 10: mod_base = OTHER; note = 2'-deoxy-2'-fluorocytidine-3'-phosphate
  modified_base 11: mod_base = OTHER; note = 2'-O-methylguanosine-3'-phosphate
  modified_base 12: mod_base = OTHER; note = 2'-O-methyluridine-3'-phosphate
  modified_base 13: mod_base = OTHER; note = 2'-O-methylcytidine-3'-phosphate
  modified_base 14: mod_base = OTHER; note = 2'-deoxy-2'-fluorouridine-3'-phosphate
  modified_base 15: mod_base = OTHER; note = 2'-O-methyladenosine-3'-phosphate
  modified_base 16: mod_base = OTHER; note = 2'-deoxy-2'-fluoroadenosine-3'-phosphate
  modified_base 17: mod_base = OTHER; note = 2'-O-methylcytidine-3'-phosphate
  modified_base 18: mod_base = OTHER; note = 2'-deoxy-2'-fluoroadenosine-3'-phosphate
  modified_base 19: mod_base = OTHER; note = 2'-O-methyluridine-3'-phosphate
  modified_base 20: mod_base = OTHER; note = 2'-deoxy-2'-fluoroadenosine-3'-phosphate
  modified_base 21: mod_base = OTHER; note = 2'-O-methylguanosine-3'-phosphorothioate
  modified_base 22: mod_base = OTHER; note = 2'-deoxy-2'-fluorocytidine-3'-phosphorothioate
  modified_base 23: mod_base = OTHER; note = 2'-O-methyladenosine
tttttacatcgtctaacatagca

SEQ ID NO: 1034 - RNA, 23 nt, synthetic construct
  source 1..23: mol_type = other RNA
  modified_base 1: mod_base = OTHER; note = 2'-O-methyladenosine-3'-phosphate
  modified_base 2: mod_base = OTHER; note = 2'-deoxy-2'-fluoroadenosine-3'-phosphate
  modified_base 3: mod_base = OTHER; note = 2'-O-methylguanosine-3'-phosphate
  modified_base 4: mod_base = OTHER; note = 2'-deoxy-2'-fluoroadenosine-3'-phosphate
  modified_base 5: mod_base = OTHER; note = 2'-O-methylcytidine-3'-phosphate
  modified_base 6: mod_base = OTHER; note = 2'-deoxy-2'-fluorouridine-3'-phosphate
  modified_base 7: mod_base = OTHER; note = 2'-O-methylguanosine-3'-phosphate
  modified_base 8: mod_base = OTHER; note = 2'-deoxy-2'-fluoroadenosine-3'-phosphate
  modified_base 9: mod_base = OTHER; note = 2'-O-methyluridine-3'-phosphate
  modified_base 10: mod_base = OTHER; note = 2'-deoxy-2'-fluorocytidine-3'-phosphate
  modified_base 11: mod_base = OTHER; note = 2'-O-methyladenosine-3'-phosphate
  modified_base 12: mod_base = OTHER; note = 2'-O-methyladenosine-3'-phosphate
  modified_base 13: mod_base = OTHER; note = 2'-O-methyladenosine-3'-phosphate
  modified_base 14: mod_base = OTHER; note = 2'-deoxy-2'-fluorouridine-3'-phosphate
  modified_base 15: mod_base = OTHER; note = 2'-O-methyladenosine-3'-phosphate
  modified_base 16: mod_base = OTHER; note = 2'-deoxy-2'-fluorouridine-3'-phosphate
  modified_base 17: mod_base = OTHER; note = 2'-O-methylguanosine-3'-phosphate
  modified_base 18: mod_base = OTHER; note = 2'-deoxy-2'-fluorouridine-3'-phosphate
  modified_base 19: mod_base = OTHER; note = 2'-O-methyluridine-3'-phosphate
  modified_base 20: mod_base = OTHER; note = 2'-deoxy-2'-fluoroguanosine-3'-phosphate
  modified_base 21: mod_base = OTHER; note = 2'-O-methyladenosine-3'-phosphorothioate
  modified_base 22: mod_base = OTHER; note = 2'-deoxy-2'-fluoroguanosine-3'-phosphorothioate
  modified_base 23: mod_base = OTHER; note = 2'-O-methyluridine
aagactgatcaaatatgttgagt

SEQ ID NO: 1035 - RNA, 23 nt, synthetic construct
  source 1..23: mol_type = other RNA
  modified_base 1: mod_base = OTHER; note = 2'-O-methyluridine-3'-phosphate
  modified_base 2: mod_base = OTHER; note = 2'-deoxy-2'-fluoroadenosine-3'-phosphate
  modified_base 3: mod_base = OTHER; note = 2'-O-methyluridine-3'-phosphate
  modified_base 4: mod_base = OTHER; note = 2'-deoxy-2'-fluoroadenosine-3'-phosphate
  modified_base 5: mod_base = OTHER; note = 2'-O-methyluridine-3'-phosphate
  modified_base 6: mod_base = OTHER; note = 2'-deoxy-2'-fluoroguanosine-3'-phosphate
  modified_base 7: mod_base = OTHER; note = 2'-O-methyluridine-3'-phosphate
  modified_base 8: mod_base = OTHER; note = 2'-deoxy-2'-fluoroadenosine-3'-phosphate
  modified_base 9: mod_base = OTHER; note = 2'-O-methylguanosine-3'-phosphate
  modified_base 10: mod_base = OTHER; note = 2'-deoxy-2'-fluorouridine-3'-phosphate
  modified_base 11: mod_base = OTHER; note = 2'-O-methyluridine-3'-phosphate
  modified_base 12: mod_base = OTHER; note = 2'-O-methylcytidine-3'-phosphate
  modified_base 13: mod_base = OTHER; note = 2'-O-methyluridine-3'-phosphate
  modified_base 14: mod_base = OTHER; note = 2'-deoxy-2'-fluorouridine-3'-phosphate
  modified_base 15: mod_base = OTHER; note = 2'-O-methylcytidine-3'-phosphate
  modified_base 16: mod_base = OTHER; note = 2'-deoxy-2'-fluorouridine-3'-phosphate
  modified_base 17: mod_base = OTHER; note = 2'-O-methylcytidine-3'-phosphate
  modified_base 18: mod_base = OTHER; note = 2'-deoxy-2'-fluoroadenosine-3'-phosphate
  modified_base 19: mod_base = OTHER; note = 2'-O-methylguanosine-3'-phosphate
  modified_base 20: mod_base = OTHER; note = 2'-deoxy-2'-fluorouridine-3'-phosphate
  modified_base 21: mod_base = OTHER; note = 2'-O-methyluridine-3'-phosphorothioate
  modified_base 22: mod_base = OTHER; note = 2'-deoxy-2'-fluorocytidine-3'-phosphorothioate
  modified_base 23: mod_base = OTHER; note = 2'-O-methylcytidine
tatatgtagttcttctcagttcc

SEQ ID NO: 1036 - RNA, 23 nt, synthetic construct
  source 1..23: mol_type = other RNA
  modified_base 1: mod_base = OTHER; note = 2'-O-methyladenosine-3'-phosphate
  modified_base 2: mod_base = OTHER; note = 2'-deoxy-2'-fluoroadenosine-3'-phosphate
  modified_base 3: mod_base = OTHER; note = 2'-O-methyladenosine-3'-phosphate
  modified_base 4: mod_base = OTHER; note = 2'-deoxy-2'-fluoroadenosine-3'-phosphate
  modified_base 5: mod_base = OTHER; note = 2'-O-methyladenosine-3'-phosphate
  modified_base 6: mod_base = OTHER; note = 2'-deoxy-2'-fluoroguanosine-3'-phosphate
  modified_base 7: mod_base = OTHER; note = 2'-O-methyladenosine-3'-phosphate
  modified_base 8: mod_base = OTHER; note = 2'-deoxy-2'-fluoroadenosine-3'-phosphate
  modified_base 9: mod_base = OTHER; note = 2'-O-methylguanosine-3'-phosphate
  modified_base 10: mod_base = OTHER; note = 2'-deoxy-2'-fluoroguanosine-3'-phosphate
  modified_base 11: mod_base = OTHER; note = 2'-O-methyladenosine-3'-phosphate
  modified_base 12: mod_base = OTHER; note = 2'-O-methylguanosine-3'-phosphate
  modified_base 13: mod_base = OTHER; note = 2'-O-methylcytidine-3'-phosphate
  modified_base 14: mod_base = OTHER; note = 2'-deoxy-2'-fluorouridine-3'-phosphate
  modified_base 15: mod_base = OTHER; note = 2'-O-methyluridine-3'-phosphate
  modified_base 16: mod_base = OTHER; note = 2'-deoxy-2'-fluoroadenosine-3'-phosphate
  modified_base 17: mod_base = OTHER; note = 2'-O-methyladenosine-3'-phosphate
  modified_base 18: mod_base = OTHER; note = 2'-deoxy-2'-fluorouridine-3'-phosphate
  modified_base 19: mod_base = OTHER; note = 2'-O-methyluridine-3'-phosphate
  modified_base 20: mod_base = OTHER; note = 2'-deoxy-2'-fluoroguanosine-3'-phosphate
  modified_base 21: mod_base = OTHER; note = 2'-O-methyluridine-3'-phosphorothioate
  modified_base 22: mod_base = OTHER; note = 2'-deoxy-2'-fluoroguanosine-3'-phosphorothioate
  modified_base 23: mod_base = OTHER; note = 2'-O-methyladenosine
aaaaagaaggagcttaattgtga

SEQ ID NO: 1037 - RNA, 23 nt, synthetic construct
  source 1..23: mol_type = other RNA
  modified_base 1: mod_base = OTHER; note = 2'-O-methyladenosine-3'-phosphate
  modified_base 2: mod_base = OTHER; note = 2'-deoxy-2'-fluorouridine-3'-phosphate
  modified_base 3: mod_base = OTHER; note = 2'-O-methylcytidine-3'-phosphate
  modified_base 4: mod_base = OTHER; note = 2'-deoxy-2'-fluorouridine-3'-phosphate
  modified_base 5: mod_base = OTHER; note = 2'-O-methyluridine-3'-phosphate
  modified_base 6: mod_base = OTHER; note = 2'-deoxy-2'-fluoroguanosine-3'-phosphate
  modified_base 7: mod_base = OTHER; note = 2'-O-methyladenosine-3'-phosphate
  modified_base 8: mod_base = OTHER; note = 2'-deoxy-2'-fluorouridine-3'-phosphate
  modified_base 9: mod_base = OTHER; note = 2'-O-methyluridine-3'-phosphate
  modified_base 10: mod_base = OTHER; note = 2'-deoxy-2'-fluorouridine-3'-phosphate
  modified_base 11: mod_base = OTHER; note = 2'-O-methyluridine-3'-phosphate
  modified_base 12: mod_base = OTHER; note = 2'-O-methylguanosine-3'-phosphate
  modified_base 13: mod_base = OTHER; note = 2'-O-methylguanosine-3'-phosphate
  modified_base 14: mod_base = OTHER; note = 2'-deoxy-2'-fluorocytidine-3'-phosphate
  modified_base 15: mod_base = OTHER; note = 2'-O-methyluridine-3'-phosphate
  modified_base 16: mod_base = OTHER; note = 2'-deoxy-2'-fluorocytidine-3'-phosphate
  modified_base 17: mod_base = OTHER; note = 2'-O-methyluridine-3'-phosphate
  modified_base 18: mod_base = OTHER; note = 2'-deoxy-2'-fluoroguanosine-3'-phosphate
  modified_base 19: mod_base = OTHER; note = 2'-O-methylguanosine-3'-phosphate
  modified_base 20: mod_base = OTHER; note = 2'-deoxy-2'-fluoroadenosine-3'-phosphate
  modified_base 21: mod_base = OTHER; note = 2'-O-methylguanosine-3'-phosphorothioate
  modified_base 22: mod_base = OTHER; note = 2'-deoxy-2'-fluoroadenosine-3'-phosphorothioate
  modified_base 23: mod_base = OTHER; note = 2'-O-methyluridine
atcttgattttggctctggagat

SEQ ID NO: 1038 - RNA, 23 nt, synthetic construct
  source 1..23: mol_type = other RNA
  modified_base 1: mod_base = OTHER; note = 2'-O-methyluridine-3'-phosphate
  modified_base 2: mod_base = OTHER; note = 2'-deoxy-2'-fluorouridine-3'-phosphate
  modified_base 3: mod_base = OTHER; note = 2'-O-methylguanosine-3'-phosphate
  modified_base 4: mod_base = OTHER; note = 2'-deoxy-2'-fluoroguanosine-3'-phosphate
  modified_base 5: mod_base = OTHER; note = 2'-O-methylcytidine-3'-phosphate
  modified_base 6: mod_base = OTHER; note = 2'-deoxy-2'-fluorouridine-3'-phosphate
  modified_base 7: mod_base = OTHER; note = 2'-O-methyladenosine-3'-phosphate
  modified_base 8: mod_base = OTHER; note = 2'-deoxy-2'-fluoroadenosine-3'-phosphate
  modified_base 9: mod_base = OTHER; note = 2'-O-methyladenosine-3'-phosphate
  modified_base 10: mod_base = OTHER; note = 2'-deoxy-2'-fluoroadenosine-3'-phosphate
  modified_base 11: mod_base = OTHER; note = 2'-O-methyluridine-3'-phosphate
  modified_base 12: mod_base = OTHER; note = 2'-O-methyluridine-3'-phosphate
  modified_base 13: mod_base = OTHER; note = 2'-O-methyluridine-3'-phosphate
  modified_base 14: mod_base = OTHER; note = 2'-deoxy-2'-fluorouridine-3'-phosphate
  modified_base 15: mod_base = OTHER; note = 2'-O-methyluridine-3'-phosphate
  modified_base 16: mod_base = OTHER; note = 2'-deoxy-2'-fluoroadenosine-3'-phosphate
  modified_base 17: mod_base = OTHER; note = 2'-O-methylcytidine-3'-phosphate
  modified_base 18: mod_base = OTHER; note = 2'-deoxy-2'-fluoroadenosine-3'-phosphate
  modified_base 19: mod_base = OTHER; note = 2'-O-methyluridine-3'-phosphate
  modified_base 20: mod_base = OTHER; note = 2'-deoxy-2'-fluorocytidine-3'-phosphate
  modified_base 21: mod_base = OTHER; note = 2'-O-methylguanosine-3'-phosphorothioate
  modified_base 22: mod_base = OTHER; note = 2'-deoxy-2'-fluorouridine-3'-phosphorothioate
  modified_base 23: mod_base = OTHER; note = 2'-O-methylcytidine
ttggctaaaatttttacatcgtc

SEQ ID NO: 1039 - RNA, 23 nt, synthetic construct
  source 1..23: mol_type = other RNA
  modified_base 1: mod_base = OTHER; note = 2'-O-methyluridine-3'-phosphate
  modified_base 2: mod_base = OTHER; note = 2'-deoxy-2'-fluoroadenosine-3'-phosphate
  modified_base 3: mod_base = OTHER; note = 2'-O-methyluridine-3'-phosphate
  modified_base 4: mod_base = OTHER; note = 2'-deoxy-2'-fluoroguanosine-3'-phosphate
  modified_base 5: mod_base = OTHER; note = 2'-O-methylguanosine-3'-phosphate
  modified_base 6: mod_base = OTHER; note = 2'-deoxy-2'-fluoroadenosine-3'-phosphate
  modified_base 7: mod_base = OTHER; note = 2'-O-methylcytidine-3'-phosphate
  modified_base 8: mod_base = OTHER; note = 2'-deoxy-2'-fluoroadenosine-3'-phosphate
  modified_base 9: mod_base = OTHER; note = 2'-O-methyladenosine-3'-phosphate
  modified_base 10: mod_base = OTHER; note = 2'-deoxy-2'-fluoroadenosine-3'-phosphate
  modified_base 11: mod_base = OTHER; note = 2'-O-methylguanosine-3'-phosphate
  modified_base 12: mod_base = OTHER; note = 2'-O-methyluridine-3'-phosphate
  modified_base 13: mod_base = OTHER; note = 2'-O-methylcytidine-3'-phosphate
  modified_base 14: mod_base = OTHER; note = 2'-deoxy-2'-fluorouridine-3'-phosphate
  modified_base 15: mod_base = OTHER; note = 2'-O-methyluridine-3'-phosphate
  modified_base 16: mod_base = OTHER; note = 2'-deoxy-2'-fluorouridine-3'-phosphate
  modified_base 17: mod_base = OTHER; note = 2'-O-methyladenosine-3'-phosphate
  modified_base 18: mod_base = OTHER; note = 2'-deoxy-2'-fluoroadenosine-3'-phosphate
  modified_base 19: mod_base = OTHER; note = 2'-O-methylguanosine-3'-phosphate
  modified_base 20: mod_base = OTHER; note = 2'-deoxy-2'-fluoroadenosine-3'-phosphate
  modified_base 21: mod_base = OTHER; note = 2'-O-methylcytidine-3'-phosphorothioate
  modified_base 22: mod_base = OTHER; note = 2'-deoxy-2'-fluorocytidine-3'-phosphorothioate
  modified_base 23: mod_base = OTHER; note = 2'-O-methyladenosine
tatggacaaagtctttaagacca

SEQ ID NO: 1040 - RNA, 23 nt, synthetic construct
  source 1..23: mol_type = other RNA
  modified_base 1: mod_base = OTHER; note = 2'-O-methyladenosine-3'-phosphate
  modified_base 2: mod_base = OTHER; note = 2'-deoxy-2'-fluoroadenosine-3'-phosphate
  modified_base 3: mod_base = OTHER; note = 2'-O-methyladenosine-3'-phosphate
  modified_base 4: mod_base = OTHER; note = 2'-deoxy-2'-fluoroguanosine-3'-phosphate
  modified_base 5: mod_base = OTHER; note = 2'-O-methyladenosine-3'-phosphate
  modified_base 6: mod_base = OTHER; note = 2'-deoxy-2'-fluorocytidine-3'-phosphate
  modified_base 7: mod_base = OTHER; note = 2'-O-methyluridine-3'-phosphate
  modified_base 8: mod_base = OTHER; note = 2'-deoxy-2'-fluoroguanosine-3'-phosphate
  modified_base 9: mod_base = OTHER; note = 2'-O-methyladenosine-3'-phosphate
  modified_base 10: mod_base = OTHER; note = 2'-deoxy-2'-fluorouridine-3'-phosphate
  modified_base 11: mod_base = OTHER; note = 2'-O-methylcytidine-3'-phosphate
  modified_base 12: mod_base = OTHER; note = 2'-O-methyladenosine-3'-phosphate
  modified_base 13: mod_base = OTHER; note = 2'-O-methyladenosine-3'-phosphate
  modified_base 14: mod_base = OTHER; note = 2'-deoxy-2'-fluoroadenosine-3'-phosphate
  modified_base 15: mod_base = OTHER; note = 2'-O-methyluridine-3'-phosphate
  modified_base 16: mod_base = OTHER; note = 2'-deoxy-2'-fluoroadenosine-3'-phosphate
  modified_base 17: mod_base = OTHER; note = 2'-O-methyluridine-3'-phosphate
  modified_base 18: mod_base = OTHER; note = 2'-deoxy-2'-fluoroguanosine-3'-phosphate
  modified_base 19: mod_base = OTHER; note = 2'-O-methyluridine-3'-phosphate
  modified_base 20: mod_base = OTHER; note = 2'-deoxy-2'-fluorouridine-3'-phosphate
  modified_base 21: mod_base = OTHER; note = 2'-O-methylguanosine-3'-phosphorothioate
  modified_base 22: mod_base = OTHER; note = 2'-deoxy-2'-fluoroadenosine-3'-phosphorothioate
  modified_base 23: mod_base = OTHER; note = 2'-O-methylguanosine
aaagactgatcaaatatgttgag

SEQ ID NO: 1041 - RNA, 23 nt, synthetic construct
  source 1..23: mol_type = other RNA
  modified_base 1: mod_base = OTHER; note = 2'-O-methyluridine-3'-phosphate
  modified_base 2: mod_base = OTHER; note = 2'-deoxy-2'-fluorouridine-3'-phosphate
  modified_base 3: mod_base = OTHER; note = 2'-O-methyladenosine-3'-phosphate
  modified_base 4: mod_base = OTHER; note = 2'-deoxy-2'-fluorouridine-3'-phosphate
  modified_base 5: mod_base = OTHER; note = 2'-O-methyladenosine-3'-phosphate
  modified_base 6: mod_base = OTHER; note = 2'-deoxy-2'-fluorouridine-3'-phosphate
  modified_base 7: mod_base = OTHER; note = 2'-O-methylguanosine-3'-phosphate
  modified_base 8: mod_base = OTHER; note = 2'-deoxy-2'-fluorouridine-3'-phosphate
  modified_base 9: mod_base = OTHER; note = 2'-O-methyladenosine-3'-phosphate
  modified_base 10: mod_base = OTHER; note = 2'-deoxy-2'-fluoroguanosine-3'-phosphate
  modified_base 11: mod_base = OTHER; note = 2'-O-methyluridine-3'-phosphate
  modified_base 12: mod_base = OTHER; note = 2'-O-methyluridine-3'-phosphate
  modified_base 13: mod_base = OTHER; note = 2'-O-methylcytidine-3'-phosphate
  modified_base 14: mod_base = OTHER; note = 2'-deoxy-2'-fluorouridine-3'-phosphate
  modified_base 15: mod_base = OTHER; note = 2'-O-methyluridine-3'-phosphate
  modified_base 16: mod_base = OTHER; note = 2'-deoxy-2'-fluorocytidine-3'-phosphate
  modified_base 17: mod_base = OTHER; note = 2'-O-methyluridine-3'-phosphate
  modified_base 18: mod_base = OTHER; note = 2'-deoxy-2'-fluorocytidine-3'-phosphate
  modified_base 19: mod_base = OTHER; note = 2'-O-methyladenosine-3'-phosphate
  modified_base 20: mod_base = OTHER; note = 2'-deoxy-2'-fluoroguanosine-3'-phosphate
  modified_base 21: mod_base = OTHER; note = 2'-O-methyluridine-3'-phosphorothioate
  modified_base 22: mod_base = OTHER; note = 2'-deoxy-2'-fluorouridine-3'-phosphorothioate
  modified_base 23: mod_base = OTHER; note = 2'-O-methylcytidine
ttatatgtagttcttctcagttc

SEQ ID NO: 1042 - RNA, 23 nt, synthetic construct
  source 1..23: mol_type = other RNA
  modified_base 1: mod_base = OTHER; note = 2'-O-methyladenosine-3'-phosphate
  modified_base 2: mod_base = OTHER; note = 2'-deoxy-2'-fluoroadenosine-3'-phosphate
  modified_base 3: mod_base = OTHER; note = 2'-O-methyladenosine-3'-phosphate
  modified_base 4: mod_base = OTHER; note = 2'-deoxy-2'-fluorouridine-3'-phosphate
  modified_base 5: mod_base = OTHER; note = 2'-O-methylcytidine-3'-phosphate
  modified_base 6: mod_base = OTHER; note = 2'-deoxy-2'-fluorouridine-3'-phosphate
  modified_base 7: mod_base = OTHER; note = 2'-O-methyluridine-3'-phosphate
  modified_base 8: mod_base = OTHER; note = 2'-deoxy-2'-fluoroguanosine-3'-phosphate
  modified_base 9: mod_base = OTHER; note = 2'-O-methyladenosine-3'-phosphate
  modified_base 10: mod_base = OTHER; note = 2'-deoxy-2'-fluorouridine-3'-phosphate
  modified_base 11: mod_base = OTHER; note = 2'-O-methyluridine-3'-phosphate
  modified_base 12: mod_base = OTHER; note = 2'-O-methyluridine-3'-phosphate
  modified_base 13: mod_base = OTHER; note = 2'-O-methyluridine-3'-phosphate
  modified_base 14: mod_base = OTHER; note = 2'-deoxy-2'-fluoroguanosine-3'-phosphate
  modified_base 15: mod_base = OTHER; note = 2'-O-methylguanosine-3'-phosphate
  modified_base 16: mod_base = OTHER; note = 2'-deoxy-2'-fluorocytidine-3'-phosphate
  modified_base 17: mod_base = OTHER; note = 2'-O-methyluridine-3'-phosphate
  modified_base 18: mod_base = OTHER; note = 2'-deoxy-2'-fluorocytidine-3'-phosphate
  modified_base 19: mod_base = OTHER; note = 2'-O-methyluridine-3'-phosphate
  modified_base 20: mod_base = OTHER; note = 2'-deoxy-2'-fluoroguanosine-3'-phosphate
  modified_base 21: mod_base = OTHER; note = 2'-O-methylguanosine-3'-phosphorothioate
  modified_base 22: mod_base = OTHER; note = 2'-deoxy-2'-fluoroadenosine-3'-phosphorothioate
  modified_base 23: mod_base = OTHER; note = 2'-O-methylguanosine
aaatcttgattttggctctggag

SEQ ID NO: 1043 - RNA, 23 nt, synthetic construct
  source 1..23: mol_type = other RNA
  modified_base 1: mod_base = OTHER; note = 2'-O-methyladenosine-3'-phosphate
  modified_base 2: mod_base = OTHER; note = 2'-deoxy-2'-fluorouridine-3'-phosphate
  modified_base 3: mod_base = OTHER; note = 2'-O-methyluridine-3'-phosphate
  modified_base 4: mod_base = OTHER; note = 2'-deoxy-2'-fluoroguanosine-3'-phosphate
  modified_base 5: mod_base = OTHER; note = 2'-O-methylguanosine-3'-phosphate
  modified_base 6: mod_base = OTHER; note = 2'-deoxy-2'-fluorocytidine-3'-phosphate
  modified_base 7: mod_base = OTHER; note = 2'-O-methyluridine-3'-phosphate
  modified_base 8: mod_base = OTHER; note = 2'-deoxy-2'-fluoroadenosine-3'-phosphate
  modified_base 9: mod_base = OTHER; note = 2'-O-methyladenosine-3'-phosphate
  modified_base 10: mod_base = OTHER; note = 2'-deoxy-2'-fluoroadenosine-3'-phosphate
  modified_base 11: mod_base = OTHER; note = 2'-O-methyladenosine-3'-phosphate
  modified_base 12: mod_base = OTHER; note = 2'-O-methyluridine-3'-phosphate
  modified_base 13: mod_base = OTHER; note = 2'-O-methyluridine-3'-phosphate
  modified_base 14: mod_base = OTHER; note = 2'-deoxy-2'-fluorouridine-3'-phosphate
  modified_base 15: mod_base = OTHER; note = 2'-O-methyluridine-3'-phosphate
  modified_base 16: mod_base = OTHER; note = 2'-deoxy-2'-fluorouridine-3'-phosphate
  modified_base 17: mod_base = OTHER; note = 2'-O-methyladenosine-3'-phosphate
  modified_base 18: mod_base = OTHER; note = 2'-deoxy-2'-fluorocytidine-3'-phosphate
  modified_base 19: mod_base = OTHER; note = 2'-O-methyladenosine-3'-phosphate
  modified_base 20: mod_base = OTHER; note = 2'-deoxy-2'-fluorouridine-3'-phosphate
  modified_base 21: mod_base = OTHER; note = 2'-O-methylcytidine-3'-phosphorothioate
  modified_base 22: mod_base = OTHER; note = 2'-deoxy-2'-fluoroguanosine-3'-phosphorothioate
  modified_base 23: mod_base = OTHER; note = 2'-O-methyluridine
attggctaaaatttttacatcgt

SEQ ID NO: 1044 - RNA, 23 nt, synthetic construct
  source 1..23: mol_type = other RNA
  modified_base 1: mod_base = OTHER; note = 2'-O-methyluridine-3'-phosphate
  modified_base 2: mod_base = OTHER; note = 2'-deoxy-2'-fluorouridine-3'-phosphate
  modified_base 3: mod_base = OTHER; note = 2'-O-methyladenosine-3'-phosphate
  modified_base 4: mod_base = OTHER; note = 2'-deoxy-2'-fluorouridine-3'-phosphate
  modified_base 5: mod_base = OTHER; note = 2'-O-methylguanosine-3'-phosphate
  modified_base 6: mod_base = OTHER; note = 2'-deoxy-2'-fluoroguanosine-3'-phosphate
  modified_base 7: mod_base = OTHER; note = 2'-O-methyladenosine-3'-phosphate
  modified_base 8: mod_base = OTHER; note = 2'-deoxy-2'-fluorocytidine-3'-phosphate
  modified_base 9: mod_base = OTHER; note = 2'-O-methyladenosine-3'-phosphate
  modified_base 10: mod_base = OTHER; note = 2'-deoxy-2'-fluoroadenosine-3'-phosphate
  modified_base 11: mod_base = OTHER; note = 2'-O-methyladenosine-3'-phosphate
  modified_base 12: mod_base = OTHER; note = 2'-O-methylguanosine-3'-phosphate
  modified_base 13: mod_base = OTHER; note = 2'-O-methyluridine-3'-phosphate
  modified_base 14: mod_base = OTHER; note = 2'-deoxy-2'-fluorocytidine-3'-phosphate
  modified_base 15: mod_base = OTHER; note = 2'-O-methyluridine-3'-phosphate
  modified_base 16: mod_base = OTHER; note = 2'-deoxy-2'-fluorouridine-3'-phosphate
  modified_base 17: mod_base = OTHER; note = 2'-O-methyluridine-3'-phosphate
  modified_base 18: mod_base = OTHER; note = 2'-deoxy-2'-fluoroadenosine-3'-phosphate
  modified_base 19: mod_base = OTHER; note = 2'-O-methyladenosine-3'-phosphate
  modified_base 20: mod_base = OTHER; note = 2'-deoxy-2'-fluoroguanosine-3'-phosphate
  modified_base 21: mod_base = OTHER; note = 2'-O-methyladenosine-3'-phosphorothioate
  modified_base 22: mod_base = OTHER; note = 2'-deoxy-2'-fluorocytidine-3'-phosphorothioate
  modified_base 23: mod_base = OTHER; note = 2'-O-methylcytidine
ttatggacaaagtctttaagacc

SEQ ID NO: 1045 - RNA, 23 nt, synthetic construct
  source 1..23: mol_type = other RNA
  modified_base 1: mod_base = OTHER; note = 2'-O-methyladenosine-3'-phosphate
  modified_base 2: mod_base = OTHER; note = 2'-deoxy-2'-fluoroadenosine-3'-phosphate
  modified_base 3: mod_base = OTHER; note = 2'-O-methyladenosine-3'-phosphate
  modified_base 4: mod_base = OTHER; note = 2'-deoxy-2'-fluoroadenosine-3'-phosphate
  modified_base 5: mod_base = OTHER; note = 2'-O-methylguanosine-3'-phosphate
  modified_base 6: mod_base = OTHER; note = 2'-deoxy-2'-fluoroadenosine-3'-phosphate
  modified_base 7: mod_base = OTHER; note = 2'-O-methylcytidine-3'-phosphate
  modified_base 8: mod_base = OTHER; note = 2'-deoxy-2'-fluorouridine-3'-phosphate
  modified_base 9: mod_base = OTHER; note = 2'-O-methylguanosine-3'-phosphate
  modified_base 10: mod_base = OTHER; note = 2'-deoxy-2'-fluoroadenosine-3'-phosphate
  modified_base 11: mod_base = OTHER; note = 2'-O-methyluridine-3'-phosphate
  modified_base 12: mod_base = OTHER; note = 2'-O-methylcytidine-3'-phosphate
  modified_base 13: mod_base = OTHER; note = 2'-O-methyladenosine-3'-phosphate
  modified_base 14: mod_base = OTHER; note = 2'-deoxy-2'-fluoroadenosine-3'-phosphate
  modified_base 15: mod_base = OTHER; note = 2'-O-methyladenosine-3'-phosphate
  modified_base 16: mod_base = OTHER; note = 2'-deoxy-2'-fluorouridine-3'-phosphate
  modified_base 17: mod_base = OTHER; note = 2'-O-methyladenosine-3'-phosphate
  modified_base 18: mod_base = OTHER; note = 2'-deoxy-2'-fluorouridine-3'-phosphate
  modified_base 19: mod_base = OTHER; note = 2'-O-methylguanosine-3'-phosphate
  modified_base 20: mod_base = OTHER; note = 2'-deoxy-2'-fluorouridine-3'-phosphate
  modified_base 21: mod_base = OTHER; note = 2'-O-methyluridine-3'-phosphorothioate
  modified_base 22: mod_base = OTHER; note = 2'-deoxy-2'-fluoroguanosine-3'-phosphorothioate
  modified_base 23: mod_base = OTHER; note = 2'-O-methyladenosine
aaaagactgatcaaatatgttga

SEQ ID NO: 1046 - RNA, 23 nt, synthetic construct
  source 1..23: mol_type = other RNA
  modified_base 1: mod_base = OTHER; note = 2'-O-methyluridine-3'-phosphate
  modified_base 2: mod_base = OTHER; note = 2'-deoxy-2'-fluorouridine-3'-phosphate
  modified_base 3: mod_base = OTHER; note = 2'-O-methyluridine-3'-phosphate
  modified_base 4: mod_base = OTHER; note = 2'-deoxy-2'-fluoroadenosine-3'-phosphate
  modified_base 5: mod_base = OTHER; note = 2'-O-methyluridine-3'-phosphate
  modified_base 6: mod_base = OTHER; note = 2'-deoxy-2'-fluoroadenosine-3'-phosphate
  modified_base 7: mod_base = OTHER; note = 2'-O-methyluridine-3'-phosphate
  modified_base 8: mod_base = OTHER; note = 2'-deoxy-2'-fluoroguanosine-3'-phosphate
  modified_base 9: mod_base = OTHER; note = 2'-O-methyluridine-3'-phosphate
  modified_base 10: mod_base = OTHER; note = 2'-deoxy-2'-fluoroadenosine-3'-phosphate
  modified_base 11: mod_base = OTHER; note = 2'-O-methylguanosine-3'-phosphate
  modified_base 12: mod_base = OTHER; note = 2'-O-methyluridine-3'-phosphate
  modified_base 13: mod_base = OTHER; note = 2'-O-methyluridine-3'-phosphate
  modified_base 14: mod_base = OTHER; note = 2'-deoxy-2'-fluorocytidine-3'-phosphate
  modified_base 15: mod_base = OTHER; note = 2'-O-methyluridine-3'-phosphate
  modified_base 16: mod_base = OTHER; note = 2'-deoxy-2'-fluorouridine-3'-phosphate
  modified_base 17: mod_base = OTHER; note = 2'-O-methylcytidine-3'-phosphate
  modified_base 18: mod_base = OTHER; note = 2'-deoxy-2'-fluorouridine-3'-phosphate
  modified_base 19: mod_base = OTHER; note = 2'-O-methylcytidine-3'-phosphate
  modified_base 20: mod_base = OTHER; note = 2'-deoxy-2'-fluoroadenosine-3'-phosphate
  modified_base 21: mod_base = OTHER; note = 2'-O-methylguanosine-3'-phosphorothioate
  modified_base 22: mod_base = OTHER; note = 2'-deoxy-2'-fluorouridine-3'-phosphorothioate
  modified_base 23: mod_base = OTHER; note = 2'-O-methyluridine
tttatatgtagttcttctcagtt

SEQ ID NO: 1047 - RNA, 23 nt, synthetic construct
  source 1..23: mol_type = other RNA
  modified_base 1: mod_base = OTHER; note = 2'-O-methyladenosine-3'-phosphate
  modified_base 2: mod_base = OTHER; note = 2'-deoxy-2'-fluorouridine-3'-phosphate
  modified_base 3: mod_base = OTHER; note = 2'-O-methyladenosine-3'-phosphate
  modified_base 4: mod_base = OTHER; note = 2'-deoxy-2'-fluoroadenosine-3'-phosphate
  modified_base 5: mod_base = OTHER; note = 2'-O-methyladenosine-3'-phosphate
  modified_base 6: mod_base = OTHER; note = 2'-deoxy-2'-fluoroadenosine-3'-phosphate
  modified_base 7: mod_base = OTHER; note = 2'-O-methyladenosine-3'-phosphate
  modified_base 8: mod_base = OTHER; note = 2'-deoxy-2'-fluoroguanosine-3'-phosphate
  modified_base 9: mod_base = OTHER; note = 2'-O-methyladenosine-3'-phosphate
  modified_base 10: mod_base = OTHER; note = 2'-deoxy-2'-fluoroadenosine-3'-phosphate
  modified_base 11: mod_base = OTHER; note = 2'-O-methylguanosine-3'-phosphate
  modified_base 12: mod_base = OTHER; note = 2'-O-methylguanosine-3'-phosphate
  modified_base 13: mod_base = OTHER; note = 2'-O-methyladenosine-3'-phosphate
  modified_base 14: mod_base = OTHER; note = 2'-deoxy-2'-fluoroguanosine-3'-phosphate
  modified_base 15: mod_base = OTHER; note = 2'-O-methylcytidine-3'-phosphate
  modified_base 16: mod_base = OTHER; note = 2'-deoxy-2'-fluorouridine-3'-phosphate
  modified_base 17: mod_base = OTHER; note = 2'-O-methyluridine-3'-phosphate
  modified_base 18: mod_base = OTHER; note = 2'-deoxy-2'-fluoroadenosine-3'-phosphate
  modified_base 19: mod_base = OTHER; note = 2'-O-methyladenosine-3'-phosphate
  modified_base 20: mod_base = OTHER; note = 2'-deoxy-2'-fluorouridine-3'-phosphate
  modified_base 21: mod_base = OTHER; note = 2'-O-methyluridine-3'-phosphorothioate
  modified_base 22: mod_base = OTHER; note = 2'-deoxy-2'-fluoroguanosine-3'-phosphorothioate
  modified_base 23: mod_base = OTHER; note = 2'-O-methyluridine
ataaaaagaaggagcttaattgt

SEQ ID NO: 1048 - RNA, 23 nt, synthetic construct
  source 1..23: mol_type = other RNA
  modified_base 1: mod_base = OTHER; note = 2'-O-methyluridine-3'-phosphate
  modified_base 2: mod_base = OTHER; note = 2'-deoxy-2'-fluoroadenosine-3'-phosphate
  modified_base 3: mod_base = OTHER; note = 2'-O-methyladenosine-3'-phosphate
  modified_base 4: mod_base = OTHER; note = 2'-deoxy-2'-fluorocytidine-3'-phosphate
  modified_base 5: mod_base = OTHER; note = 2'-O-methyladenosine-3'-phosphate
  modified_base 6: mod_base = OTHER; note = 2'-deoxy-2'-fluorouridine-3'-phosphate
  modified_base 7: mod_base = OTHER; note = 2'-O-methyladenosine-3'-phosphate
  modified_base 8: mod_base = OTHER; note = 2'-deoxy-2'-fluoroguanosine-3'-phosphate
  modified_base 9: mod_base = OTHER; note = 2'-O-methylcytidine-3'-phosphate
  modified_base 10: mod_base = OTHER; note = 2'-deoxy-2'-fluoroadenosine-3'-phosphate
  modified_base 11: mod_base = OTHER; note = 2'-O-methyladenosine-3'-phosphate
  modified_base 12: mod_base = OTHER; note = 2'-O-methyladenosine-3'-phosphate
  modified_base 13: mod_base = OTHER; note = 2'-O-methyluridine-3'-phosphate
  modified_base 14: mod_base = OTHER; note = 2'-deoxy-2'-fluorocytidine-3'-phosphate
  modified_base 15: mod_base = OTHER; note = 2'-O-methyluridine-3'-phosphate
  modified_base 16: mod_base = OTHER; note = 2'-deoxy-2'-fluorouridine-3'-phosphate
  modified_base 17: mod_base = OTHER; note = 2'-O-methylguanosine-3'-phosphate
  modified_base 18: mod_base = OTHER; note = 2'-deoxy-2'-fluoroadenosine-3'-phosphate
  modified_base 19: mod_base = OTHER; note = 2'-O-methyluridine-3'-phosphate
  modified_base 20: mod_base = OTHER; note = 2'-deoxy-2'-fluorouridine-3'-phosphate
  modified_base 21: mod_base = OTHER; note = 2'-O-methyluridine-3'-phosphorothioate
  modified_base 22: mod_base = OTHER; note = 2'-deoxy-2'-fluorouridine-3'-phosphorothioate
  modified_base 23: mod_base = OTHER; note = 2'-O-methylguanosine
taacatagcaaatcttgattttg

SEQ ID NO: 1049 - RNA, 23 nt, synthetic construct
  source 1..23: mol_type = other RNA
  modified_base 1: mod_base = OTHER; note = 2'-O-methyluridine-3'-phosphate
  modified_base 2: mod_base = OTHER; note = 2'-deoxy-2'-fluoroadenosine-3'-phosphate
  modified_base 3: mod_base = OTHER; note = 2'-O-methyladenosine-3'-phosphate
  modified_base 4: mod_base = OTHER; note = 2'-deoxy-2'-fluoroguanosine-3'-phosphate
  modified_base 5: mod_base = OTHER; note = 2'-O-methyladenosine-3'-phosphate
  modified_base 6: mod_base = OTHER; note = 2'-deoxy-2'-fluorocytidine-3'-phosphate
  modified_base 7: mod_base = OTHER; note = 2'-O-methylcytidine-3'-phosphate
  modified_base 8: mod_base = OTHER; note = 2'-deoxy-2'-fluoroadenosine-3'-phosphate
  modified_base 9: mod_base = OTHER; note = 2'-O-methyluridine-3'-phosphate
  modified_base 10: mod_base = OTHER; note = 2'-deoxy-2'-fluoroguanosine-3'-phosphate
  modified_base 11: mod_base = OTHER; note = 2'-O-methyluridine-3'-phosphate
  modified_base 12: mod_base = OTHER; note = 2'-O-methylcytidine-3'-phosphate
  modified_base 13: mod_base = OTHER; note = 2'-O-methylcytidine-3'-phosphate
  modified_base 14: mod_base = OTHER; note = 2'-deoxy-2'-fluorocytidine-3'-phosphate
  modified_base 15: mod_base = OTHER; note = 2'-O-methyladenosine-3'-phosphate
  modified_base 16: mod_base = OTHER; note = 2'-deoxy-2'-fluoroadenosine-3'-phosphate
  modified_base 17: mod_base = OTHER; note = 2'-O-methylcytidine-3'-phosphate
  modified_base 18: mod_base = OTHER; note = 2'-deoxy-2'-fluorouridine-3'-phosphate
  modified_base 19: mod_base = OTHER; note = 2'-O-methylguanosine-3'-phosphate
  modified_base 20: mod_base = OTHER; note = 2'-deoxy-2'-fluoroadenosine-3'-phosphate
  modified_base 21: mod_base = OTHER; note = 2'-O-methyladenosine-3'-phosphorothioate
  modified_base 22: mod_base = OTHER; note = 2'-deoxy-2'-fluoroguanosine-3'-phosphorothioate
  modified_base 23: mod_base = OTHER; note = 2'-O-methylguanosine
taagaccatgtcccaactgaagg

SEQ ID NO: 1050 - RNA, 23 nt, synthetic construct
  source 1..23: mol_type = other RNA
  modified_base 1: mod_base = OTHER; note = 2'-O-methyladenosine-3'-phosphate
  modified_base 2: mod_base = OTHER; note = 2'-deoxy-2'-fluoroadenosine-3'-phosphate
  modified_base 3: mod_base = OTHER; note = 2'-O-methyluridine-3'-phosphate
  modified_base 4: mod_base = OTHER; note = 2'-deoxy-2'-fluoroadenosine-3'-phosphate
  modified_base 5: mod_base = OTHER; note = 2'-O-methyluridine-3'-phosphate
  modified_base 6: mod_base = OTHER; note = 2'-deoxy-2'-fluoroguanosine-3'-phosphate
  modified_base 7: mod_base = OTHER; note = 2'-O-methyluridine-3'-phosphate
  modified_base 8: mod_base = OTHER; note = 2'-deoxy-2'-fluorocytidine-3'-phosphate
  modified_base 9: mod_base = OTHER; note = 2'-O-methyladenosine-3'-phosphate
  modified_base 10: mod_base = OTHER; note = 2'-deoxy-2'-fluorouridine-3'-phosphate
  modified_base 11: mod_base = OTHER; note = 2'-O-methyluridine-3'-phosphate
  modified_base 12: mod_base = OTHER; note = 2'-O-methyladenosine-3'-phosphate
  modified_base 13: mod_base = OTHER; note = 2'-O-methyladenosine-3'-phosphate
  modified_base 14: mod_base = OTHER; note = 2'-deoxy-2'-fluorouridine-3'-phosphate
  modified_base 15: mod_base = OTHER; note = 2'-O-methyluridine-3'-phosphate
  modified_base 16: mod_base = OTHER; note = 2'-deoxy-2'-fluorouridine-3'-phosphate
  modified_base 17: mod_base = OTHER; note = 2'-O-methylguanosine-3'-phosphate
  modified_base 18: mod_base = OTHER; note = 2'-deoxy-2'-fluoroguanosine-3'-phosphate
  modified_base 19: mod_base = OTHER; note = 2'-O-methylcytidine-3'-phosphate
  modified_base 20: mod_base = OTHER; note = 2'-deoxy-2'-fluorocytidine-3'-phosphate
  modified_base 21: mod_base = OTHER; note = 2'-O-methylcytidine-3'-phosphorothioate
  modified_base 22: mod_base = OTHER; note = 2'-deoxy-2'-fluorouridine-3'-phosphorothioate
  modified_base 23: mod_base = OTHER; note = 2'-O-methyluridine
aatatgtcattaatttggccctt

SEQ ID NO: 1051 - RNA, 23 nt, synthetic construct
  source 1..23: mol_type = other RNA
  modified_base 1: mod_base = OTHER; note = 2'-O-methyladenosine-3'-phosphate
  modified_base 2: mod_base = OTHER; note = 2'-deoxy-2'-fluoroadenosine-3'-phosphate
  modified_base 3: mod_base = OTHER; note = 2'-O-methyladenosine-3'-phosphate
  modified_base 4: mod_base = OTHER; note = 2'-deoxy-2'-fluoroadenosine-3'-phosphate
  modified_base 5: mod_base = OTHER; note = 2'-O-methyladenosine-3'-phosphate
  modified_base 6: mod_base = OTHER; note = 2'-deoxy-2'-fluoroguanosine-3'-phosphate
  modified_base 7: mod_base = OTHER; note = 2'-O-methyladenosine-3'-phosphate
  modified_base 8: mod_base = OTHER; note = 2'-deoxy-2'-fluorocytidine-3'-phosphate
  modified_base 9: mod_base = OTHER; note = 2'-O-methyluridine-3'-phosphate
  modified_base 10: mod_base = OTHER; note = 2'-deoxy-2'-fluoroguanosine-3'-phosphate
  modified_base 11: mod_base = OTHER; note = 2'-O-methyladenosine-3'-phosphate
  modified_base 12: mod_base = OTHER; note = 2'-O-methyluridine-3'-phosphate
  modified_base 13: mod_base = OTHER; note = 2'-O-methylcytidine-3'-phosphate
  modified_base 14: mod_base = OTHER; note = 2'-deoxy-2'-fluoroadenosine-3'-phosphate
  modified_base 15: mod_base = OTHER; note = 2'-O-methyladenosine-3'-phosphate
  modified_base 16: mod_base = OTHER; note = 2'-deoxy-2'-fluoroadenosine-3'-phosphate
  modified_base 17: mod_base = OTHER; note = 2'-O-methyluridine-3'-phosphate
  modified_base 18: mod_base = OTHER; note = 2'-deoxy-2'-fluoroadenosine-3'-phosphate
  modified_base 19: mod_base = OTHER; note = 2'-O-methyluridine-3'-phosphate
  modified_base 20: mod_base = OTHER; note = 2'-deoxy-2'-fluoroguanosine-3'-phosphate
  modified_base 21: mod_base = OTHER; note = 2'-O-methyluridine-3'-phosphorothioate
  modified_base 22: mod_base = OTHER; note = 2'-deoxy-2'-fluorouridine-3'-phosphorothioate
  modified_base 23: mod_base = OTHER; note = 2'-O-methylguanosine
aaaaagactgatcaaatatgttg

SEQ ID NO: 1052 - RNA, 23 nt, synthetic construct
  source 1..23: mol_type = other RNA
  modified_base 1: mod_base = OTHER; note = 2'-O-methyluridine-3'-phosphate
  modified_base 2: mod_base = OTHER; note = 2'-deoxy-2'-fluorouridine-3'-phosphate
  modified_base 3: mod_base = OTHER; note = 2'-O-methylguanosine-3'-phosphate
  modified_base 4: mod_base = OTHER; note = 2'-deoxy-2'-fluorouridine-3'-phosphate
  modified_base 5: mod_base = OTHER; note = 2'-O-methyladenosine-3'-phosphate
  modified_base 6: mod_base = OTHER; note = 2'-deoxy-2'-fluoroguanosine-3'-phosphate
  modified_base 7: mod_base = OTHER; note = 2'-O-methyluridine-3'-phosphate
  modified_base 8: mod_base = OTHER; note = 2'-deoxy-2'-fluorouridine-3'-phosphate
  modified_base 9: mod_base = OTHER; note = 2'-O-methyluridine-3'-phosphate
  modified_base 10: mod_base = OTHER; note = 2'-deoxy-2'-fluoroadenosine-3'-phosphate
  modified_base 11: mod_base = OTHER; note = 2'-O-methyluridine-3'-phosphate
  modified_base 12: mod_base = OTHER; note = 2'-O-methyladenosine-3'-phosphate
  modified_base 13: mod_base = OTHER; note = 2'-O-methyluridine-3'-phosphate
  modified_base 14: mod_base = OTHER; note = 2'-deoxy-2'-fluoroguanosine-3'-phosphate
  modified_base 15: mod_base = OTHER; note = 2'-O-methyluridine-3'-phosphate
  modified_base 16: mod_base = OTHER; note = 2'-deoxy-2'-fluoroadenosine-3'-phosphate
  modified_base 17: mod_base = OTHER; note = 2'-O-methylguanosine-3'-phosphate
  modified_base 18: mod_base = OTHER; note = 2'-deoxy-2'-fluorouridine-3'-phosphate
  modified_base 19: mod_base = OTHER; note = 2'-O-methyluridine-3'-phosphate
  modified_base 20: mod_base = OTHER; note = 2'-deoxy-2'-fluorocytidine-3'-phosphate
  modified_base 21: mod_base = OTHER; note = 2'-O-methyluridine-3'-phosphorothioate
  modified_base 22: mod_base = OTHER; note = 2'-deoxy-2'-fluorouridine-3'-phosphorothioate
  modified_base 23: mod_base = OTHER; note = 2'-O-methylcytidine
ttgtagtttatatgtagttcttc

SEQ ID NO: 1053 - RNA, 23 nt, synthetic construct
  source 1..23: mol_type = other RNA
  modified_base 1: mod_base = OTHER; note = 2'-O-methyladenosine-3'-phosphate
  modified_base 2: mod_base = OTHER; note = 2'-deoxy-2'-fluoroadenosine-3'-phosphate
  modified_base 3: mod_base = OTHER; note = 2'-O-methyluridine-3'-phosphate
  modified_base 4: mod_base = OTHER; note = 2'-deoxy-2'-fluoroadenosine-3'-phosphate
  modified_base 5: mod_base = OTHER; note = 2'-O-methyladenosine-3'-phosphate
  modified_base 6: mod_base = OTHER; note = 2'-deoxy-2'-fluoroadenosine-3'-phosphate
  modified_base 7: mod_base = OTHER; note = 2'-O-methyladenosine-3'-phosphate
  modified_base 8: mod_base = OTHER; note = 2'-deoxy-2'-fluoroadenosine-3'-phosphate
  modified_base 9: mod_base = OTHER; note = 2'-O-methylguanosine-3'-phosphate
  modified_base 10: mod_base = OTHER; note = 2'-deoxy-2'-fluoroadenosine-3'-phosphate
  modified_base 11: mod_base = OTHER; note = 2'-O-methyladenosine-3'-phosphate
  modified_base 12: mod_base = OTHER; note = 2'-O-methylguanosine-3'-phosphate
  modified_base 13: mod_base = OTHER; note = 2'-O-methylguanosine-3'-phosphate
  modified_base 14: mod_base = OTHER; note = 2'-deoxy-2'-fluoroadenosine-3'-phosphate
  modified_base 15: mod_base = OTHER; note = 2'-O-methylguanosine-3'-phosphate
  modified_base 16: mod_base = OTHER; note = 2'-deoxy-2'-fluorocytidine-3'-phosphate
  modified_base 17: mod_base = OTHER; note = 2'-O-methyluridine-3'-phosphate
  modified_base 18: mod_base = OTHER; note = 2'-deoxy-2'-fluorouridine-3'-phosphate
  modified_base 19: mod_base = OTHER; note = 2'-O-methyladenosine-3'-phosphate
  modified_base 20: mod_base = OTHER; note = 2'-deoxy-2'-fluoroadenosine-3'-phosphate
  modified_base 21: mod_base = OTHER; note = 2'-O-methyluridine-3'-phosphorothioate
  modified_base 22: mod_base = OTHER; note = 2'-deoxy-2'-fluorouridine-3'-phosphorothioate
  modified_base 23: mod_base = OTHER; note = 2'-O-methylguanosine
aataaaaagaaggagcttaattg

SEQ ID NO: 1054 - RNA, 23 nt, synthetic construct
  source 1..23: mol_type = other RNA
  modified_base 1: mod_base = OTHER; note = 2'-O-methyladenosine-3'-phosphate
  modified_base 2: mod_base = OTHER; note = 2'-deoxy-2'-fluorouridine-3'-phosphate
  modified_base 3: mod_base = OTHER; note = 2'-O-methylcytidine-3'-phosphate
  modified_base 4: mod_base = OTHER; note = 2'-deoxy-2'-fluoroguanosine-3'-phosphate
  modified_base 5: mod_base = OTHER; note = 2'-O-methyluridine-3'-phosphate
  modified_base 6: mod_base = OTHER; note = 2'-deoxy-2'-fluorocytidine-3'-phosphate
  modified_base 7: mod_base = OTHER; note = 2'-O-methyluridine-3'-phosphate
  modified_base 8: mod_base = OTHER; note = 2'-deoxy-2'-fluoroadenosine-3'-phosphate
  modified_base 9: mod_base = OTHER; note = 2'-O-methyladenosine-3'-phosphate
  modified_base 10: mod_base = OTHER; note = 2'-deoxy-2'-fluorocytidine-3'-phosphate
  modified_base 11: mod_base = OTHER; note = 2'-O-methyladenosine-3'-phosphate
  modified_base 12: mod_base = OTHER; note = 2'-O-methyluridine-3'-phosphate
  modified_base 13: mod_base = OTHER; note = 2'-O-methyladenosine-3'-phosphate
  modified_base 14: mod_base = OTHER; note = 2'-deoxy-2'-fluoroguanosine-3'-phosphate
  modified_base 15: mod_base = OTHER; note = 2'-O-methylcytidine-3'-phosphate
  modified_base 16: mod_base = OTHER; note = 2'-deoxy-2'-fluoroadenosine-3'-phosphate
  modified_base 17: mod_base = OTHER; note = 2'-O-methyladenosine-3'-phosphate
  modified_base 18: mod_base = OTHER; note = 2'-deoxy-2'-fluoroadenosine-3'-phosphate
  modified_base 19: mod_base = OTHER; note = 2'-O-methyluridine-3'-phosphate
  modified_base 20: mod_base = OTHER; note = 2'-deoxy-2'-fluorocytidine-3'-phosphate
  modified_base 21: mod_base = OTHER; note = 2'-O-methyluridine-3'-phosphorothioate
  modified_base 22: mod_base = OTHER; note = 2'-deoxy-2'-fluorouridine-3'-phosphorothioate
  modified_base 23: mod_base = OTHER; note = 2'-O-methylguanosine
atcgtctaacatagcaaatcttg

SEQ ID NO: 1055 - RNA, 23 nt, synthetic construct
  source 1..23: mol_type = other RNA
  modified_base 1: mod_base = OTHER; note = 2'-O-methyluridine-3'-phosphate
  modified_base 2: mod_base = OTHER; note = 2'-deoxy-2'-fluorouridine-3'-phosphate
  modified_base 3: mod_base = OTHER; note = 2'-O-methyladenosine-3'-phosphate
  modified_base 4: mod_base = OTHER; note = 2'-deoxy-2'-fluoroadenosine-3'-phosphate
  modified_base 5: mod_base = OTHER; note = 2'-O-methylguanosine-3'-phosphate
  modified_base 6: mod_base = OTHER; note = 2'-deoxy-2'-fluoroadenosine-3'-phosphate
  modified_base 7: mod_base = OTHER; note = 2'-O-methylcytidine-3'-phosphate
  modified_base 8: mod_base = OTHER; note = 2'-deoxy-2'-fluorocytidine-3'-phosphate
  modified_base 9: mod_base = OTHER; note = 2'-O-methyladenosine-3'-phosphate
  modified_base 10: mod_base = OTHER; note = 2'-deoxy-2'-fluorouridine-3'-phosphate
  modified_base 11: mod_base = OTHER; note = 2'-O-methylguanosine-3'-phosphate
  modified_base 12: mod_base = OTHER; note = 2'-O-methyluridine-3'-phosphate
  modified_base 13: mod_base = OTHER; note = 2'-O-methylcytidine-3'-phosphate
  modified_base 14: mod_base = OTHER; note = 2'-deoxy-2'-fluorocytidine-3'-phosphate
  modified_base 15: mod_base = OTHER; note = 2'-O-methylcytidine-3'-phosphate
  modified_base 16: mod_base = OTHER; note = 2'-deoxy-2'-fluoroadenosine-3'-phosphate
  modified_base 17: mod_base = OTHER; note = 2'-O-methyladenosine-3'-phosphate
  modified_base 18: mod_base = OTHER; note = 2'-deoxy-2'-fluorocytidine-3'-phosphate
  modified_base 19: mod_base = OTHER; note = 2'-O-methyluridine-3'-phosphate
  modified_base 20: mod_base = OTHER; note = 2'-deoxy-2'-fluoroguanosine-3'-phosphate
  modified_base 21: mod_base = OTHER; note = 2'-O-methyladenosine-3'-phosphorothioate
  modified_base 22: mod_base = OTHER; note = 2'-deoxy-2'-fluoroadenosine-3'-phosphorothioate
  modified_base 23: mod_base = OTHER; note = 2'-O-methylguanosine
ttaagaccatgtcccaactgaag

SEQ ID NO: 1056 - RNA, 23 nt, synthetic construct
  source 1..23: mol_type = other RNA
  modified_base 1: mod_base = OTHER; note = 2'-O-methyladenosine-3'-phosphate
  modified_base 2: mod_base = OTHER; note = 2'-deoxy-2'-fluoroadenosine-3'-phosphate
  modified_base 3: mod_base = OTHER; note = 2'-O-methyladenosine-3'-phosphate
  modified_base 4: mod_base = OTHER; note = 2'-deoxy-2'-fluorouridine-3'-phosphate
  modified_base 5: mod_base = OTHER; note = 2'-O-methyladenosine-3'-phosphate
  modified_base 6: mod_base = OTHER; note = 2'-deoxy-2'-fluorouridine-3'-phosphate
  modified_base 7: mod_base = OTHER; note = 2'-O-methylguanosine-3'-phosphate
  modified_base 8: mod_base = OTHER; note = 2'-deoxy-2'-fluorouridine-3'-phosphate
  modified_base 9: mod_base = OTHER; note = 2'-O-methylcytidine-3'-phosphate
  modified_base 10: mod_base = OTHER; note = 2'-deoxy-2'-fluoroadenosine-3'-phosphate
  modified_base 11: mod_base = OTHER; note = 2'-O-methyluridine-3'-phosphate
  modified_base 12: mod_base = OTHER; note = 2'-O-methyluridine-3'-phosphate
  modified_base 13: mod_base = OTHER; note = 2'-O-methyladenosine-3'-phosphate
  modified_base 14: mod_base = OTHER; note = 2'-deoxy-2'-fluoroadenosine-3'-phosphate
  modified_base 15: mod_base = OTHER; note = 2'-O-methyluridine-3'-phosphate
  modified_base 16: mod_base = OTHER; note = 2'-deoxy-2'-fluorouridine-3'-phosphate
  modified_base 17: mod_base = OTHER; note = 2'-O-methyluridine-3'-phosphate
  modified_base 18: mod_base = OTHER; note = 2'-deoxy-2'-fluoroguanosine-3'-phosphate
  modified_base 19: mod_base = OTHER; note = 2'-O-methylguanosine-3'-phosphate
  modified_base 20: mod_base = OTHER; note = 2'-deoxy-2'-fluorocytidine-3'-phosphate
  modified_base 21: mod_base = OTHER; note = 2'-O-methylcytidine-3'-phosphorothioate
  modified_base 22: mod_base = OTHER; note = 2'-deoxy-2'-fluorocytidine-3'-phosphorothioate
  modified_base 23: mod_base = OTHER; note = 2'-O-methyluridine
aaatatgtcattaatttggccct

SEQ ID NO: 1057 - RNA, 23 nt, synthetic construct
  source 1..23: mol_type = other RNA
  modified_base 1: mod_base = OTHER; note = 2'-O-methyluridine-3'-phosphate
  modified_base 2: mod_base = OTHER; note = 2'-deoxy-2'-fluoroadenosine-3'-phosphate
  modified_base 3: mod_base = OTHER; note = 2'-O-methyladenosine-3'-phosphate
  modified_base 4: mod_base = OTHER; note = 2'-deoxy-2'-fluoroadenosine-3'-phosphate
  modified_base 5: mod_base = OTHER; note = 2'-O-methyladenosine-3'-phosphate
  modified_base 6: mod_base = OTHER; note = 2'-deoxy-2'-fluoroadenosine-3'-phosphate
  modified_base 7: mod_base = OTHER; note = 2'-O-methylguanosine-3'-phosphate
  modified_base 8: mod_base = OTHER; note = 2'-deoxy-2'-fluoroadenosine-3'-phosphate
  modified_base 9: mod_base = OTHER; note = 2'-O-methylcytidine-3'-phosphate
  modified_base 10: mod_base = OTHER; note = 2'-deoxy-2'-fluorouridine-3'-phosphate
  modified_base 11: mod_base = OTHER; note = 2'-O-methylguanosine-3'-phosphate
  modified_base 12: mod_base = OTHER; note = 2'-O-methyladenosine-3'-phosphate
  modified_base 13: mod_base = OTHER; note = 2'-O-methyluridine-3'-phosphate
  modified_base 14: mod_base = OTHER; note = 2'-deoxy-2'-fluorocytidine-3'-phosphate
  modified_base 15: mod_base = OTHER; note = 2'-O-methyladenosine-3'-phosphate
  modified_base 16: mod_base = OTHER; note = 2'-deoxy-2'-fluoroadenosine-3'-phosphate
  modified_base 17: mod_base = OTHER; note = 2'-O-methyladenosine-3'-phosphate
  modified_base 18: mod_base = OTHER; note = 2'-deoxy-2'-fluorouridine-3'-phosphate
  modified_base 19: mod_base = OTHER; note = 2'-O-methyladenosine-3'-phosphate
  modified_base 20: mod_base = OTHER; note = 2'-deoxy-2'-fluorouridine-3'-phosphate
  modified_base 21: mod_base = OTHER; note = 2'-O-methylguanosine-3'-phosphorothioate
  modified_base 22: mod_base = OTHER; note = 2'-deoxy-2'-fluorouridine-3'-phosphorothioate
  modified_base 23: mod_base = OTHER; note = 2'-O-methyluridine
taaaaagactgatcaaatatgtt

SEQ ID NO: 1058 - RNA, 23 nt, synthetic construct
  source 1..23: mol_type = other RNA
  modified_base 1: mod_base = OTHER; note = 2'-O-methyluridine-3'-phosphate
  modified_base 2: mod_base = OTHER; note = 2'-deoxy-2'-fluorouridine-3'-phosphate
  modified_base 3: mod_base = OTHER; note = 2'-O-methylguanosine-3'-phosphate
  modified_base 4: mod_base = OTHER; note = 2'-deoxy-2'-fluoroadenosine-3'-phosphate
  modified_base 5: mod_base = OTHER; note = 2'-O-methylcytidine-3'-phosphate
  modified_base 6: mod_base = OTHER; note = 2'-deoxy-2'-fluorouridine-3'-phosphate
  modified_base 7: mod_base = OTHER; note = 2'-O-methyluridine-3'-phosphate
  modified_base 8: mod_base = OTHER; note = 2'-deoxy-2'-fluoroguanosine-3'-phosphate
  modified_base 9: mod_base = OTHER; note = 2'-O-methyluridine-3'-phosphate
  modified_base 10: mod_base = OTHER; note = 2'-deoxy-2'-fluoroadenosine-3'-phosphate
  modified_base 11: mod_base = OTHER; note = 2'-O-methylguanosine-3'-phosphate
  modified_base 12: mod_base = OTHER; note = 2'-O-methyluridine-3'-phosphate
  modified_base 13: mod_base = OTHER; note = 2'-O-methyluridine-3'-phosphate
  modified_base 14: mod_base = OTHER; note = 2'-deoxy-2'-fluorouridine-3'-phosphate
  modified_base 15: mod_base = OTHER; note = 2'-O-methyladenosine-3'-phosphate
  modified_base 16: mod_base = OTHER; note = 2'-deoxy-2'-fluorouridine-3'-phosphate
  modified_base 17: mod_base = OTHER; note = 2'-O-methyladenosine-3'-phosphate
  modified_base 18: mod_base = OTHER; note = 2'-deoxy-2'-fluorouridine-3'-phosphate
  modified_base 19: mod_base = OTHER; note = 2'-O-methylguanosine-3'-phosphate
  modified_base 20: mod_base = OTHER; note = 2'-deoxy-2'-fluorouridine-3'-phosphate
  modified_base 21: mod_base = OTHER; note = 2'-O-methyladenosine-3'-phosphorothioate
  modified_base 22: mod_base = OTHER; note = 2'-deoxy-2'-fluoroguanosine-3'-phosphorothioate
  modified_base 23: mod_base = OTHER; note = 2'-O-methyluridine
ttgacttgtagtttatatgtagt

SEQ ID NO: 1059 - RNA, 23 nt, synthetic construct
  source 1..23: mol_type = other RNA
  modified_base 1: mod_base = OTHER; note = 2'-O-methyladenosine-3'-phosphate
  modified_base 2: mod_base = OTHER; note = 2'-deoxy-2'-fluorouridine-3'-phosphate
  modified_base 3: mod_base = OTHER; note = 2'-O-methyladenosine-3'-phosphate
  modified_base 4: mod_base = OTHER; note = 2'-deoxy-2'-fluoroadenosine-3'-phosphate
  modified_base 5: mod_base = OTHER; note = 2'-O-methylcytidine-3'-phosphate
  modified_base 6: mod_base = OTHER; note = 2'-deoxy-2'-fluorouridine-3'-phosphate
  modified_base 7: mod_base = OTHER; note = 2'-O-methyladenosine-3'-phosphate
  modified_base 8: mod_base = OTHER; note = 2'-deoxy-2'-fluoroguanosine-3'-phosphate
  modified_base 9: mod_base = OTHER; note = 2'-O-methyladenosine-3'-phosphate
  modified_base 10: mod_base = OTHER; note = 2'-deoxy-2'-fluoroguanosine-3'-phosphate
  modified_base 11: mod_base = OTHER; note = 2'-O-methylguanosine-3'-phosphate
  modified_base 12: mod_base = OTHER; note = 2'-O-methyladenosine-3'-phosphate
  modified_base 13: mod_base = OTHER; note = 2'-O-methyladenosine-3'-phosphate
  modified_base 14: mod_base = OTHER; note = 2'-deoxy-2'-fluorocytidine-3'-phosphate
  modified_base 15: mod_base = OTHER; note = 2'-O-methyladenosine-3'-phosphate
  modified_base 16: mod_base = OTHER; note = 2'-deoxy-2'-fluoroadenosine-3'-phosphate
  modified_base 17: mod_base = OTHER; note = 2'-O-methyluridine-3'-phosphate
  modified_base 18: mod_base = OTHER; note = 2'-deoxy-2'-fluoroadenosine-3'-phosphate
  modified_base 19: mod_base = OTHER; note = 2'-O-methyladenosine-3'-phosphate
  modified_base 20: mod_base = OTHER; note = 2'-deoxy-2'-fluoroadenosine-3'-phosphate
  modified_base 21: mod_base = OTHER; note = 2'-O-methyladenosine-3'-phosphorothioate
  modified_base 22: mod_base = OTHER; note = 2'-deoxy-2'-fluoroadenosine-3'-phosphorothioate
  modified_base 23: mod_base = OTHER; note = 2'-O-methylguanosine
ataactagaggaacaataaaaag

SEQ ID NO: 1060 - RNA, 23 nt, synthetic construct
  source 1..23: mol_type = other RNA
  modified_base 1: mod_base = OTHER; note = 2'-O-methyluridine-3'-phosphate
  modified_base 2: mod_base = OTHER; note = 2'-deoxy-2'-fluorouridine-3'-phosphate
  modified_base 3: mod_base = OTHER; note = 2'-O-methyladenosine-3'-phosphate
  modified_base 4: mod_base = OTHER; note = 2'-deoxy-2'-fluorocytidine-3'-phosphate
  modified_base 5: mod_base = OTHER; note = 2'-O-methyladenosine-3'-phosphate
  modified_base 6: mod_base = OTHER; note = 2'-deoxy-2'-fluorouridine-3'-phosphate
  modified_base 7: mod_base = OTHER; note = 2'-O-methylcytidine-3'-phosphate
  modified_base 8: mod_base = OTHER; note = 2'-deoxy-2'-fluoroguanosine-3'-phosphate
  modified_base 9: mod_base = OTHER; note = 2'-O-methyluridine-3'-phosphate
  modified_base 10: mod_base = OTHER; note = 2'-deoxy-2'-fluorocytidine-3'-phosphate
  modified_base 11: mod_base = OTHER; note = 2'-O-methyluridine-3'-phosphate
  modified_base 12: mod_base = OTHER; note = 2'-O-methyladenosine-3'-phosphate
  modified_base 13: mod_base = OTHER; note = 2'-O-methyladenosine-3'-phosphate
  modified_base 14: mod_base = OTHER; note = 2'-deoxy-2'-fluorocytidine-3'-phosphate
  modified_base 15: mod_base = OTHER; note = 2'-O-methyladenosine-3'-phosphate
  modified_base 16: mod_base = OTHER; note = 2'-deoxy-2'-fluorouridine-3'-phosphate
  modified_base 17: mod_base = OTHER; note = 2'-O-methyladenosine-3'-phosphate
  modified_base 18: mod_base = OTHER; note = 2'-deoxy-2'-fluoroguanosine-3'-phosphate
  modified_base 19: mod_base = OTHER; note = 2'-O-methylcytidine-3'-phosphate
  modified_base 20: mod_base = OTHER; note = 2'-deoxy-2'-fluoroadenosine-3'-phosphate
  modified_base 21: mod_base = OTHER; note = 2'-O-methyladenosine-3'-phosphorothioate
  modified_base 22: mod_base = OTHER; note = 2'-deoxy-2'-fluoroadenosine-3'-phosphorothioate
  modified_base 23: mod_base = OTHER; note = 2'-O-methyluridine
ttacatcgtctaacatagcaaat

SEQ ID NO: 1061 - RNA, 23 nt, synthetic construct
  source 1..23: mol_type = other RNA
  modified_base 1: mod_base = OTHER; note = 2'-O-methyluridine-3'-phosphate
  modified_base 2: mod_base = OTHER; note = 2'-deoxy-2'-fluorouridine-3'-phosphate
  modified_base 3: mod_base = OTHER; note = 2'-O-methyluridine-3'-phosphate
  modified_base 4: mod_base = OTHER; note = 2'-deoxy-2'-fluoroadenosine-3'-phosphate
  modified_base 5: mod_base = OTHER; note = 2'-O-methyladenosine-3'-phosphate
  modified_base 6: mod_base = OTHER; note = 2'-deoxy-2'-fluoroguanosine-3'-phosphate
  modified_base 7: mod_base = OTHER; note = 2'-O-methyladenosine-3'-phosphate
  modified_base 8: mod_base = OTHER; note = 2'-deoxy-2'-fluorocytidine-3'-phosphate
  modified_base 9: mod_base = OTHER; note = 2'-O-methylcytidine-3'-phosphate
  modified_base 10: mod_base = OTHER; note = 2'-deoxy-2'-fluoroadenosine-3'-phosphate
  modified_base 11: mod_base = OTHER; note = 2'-O-methyluridine-3'-phosphate
  modified_base 12: mod_base = OTHER; note = 2'-O-methylguanosine-3'-phosphate
  modified_base 13: mod_base = OTHER; note = 2'-O-methyluridine-3'-phosphate
  modified_base 14: mod_base = OTHER; note = 2'-deoxy-2'-fluorocytidine-3'-phosphate
  modified_base 15: mod_base = OTHER; note = 2'-O-methylcytidine-3'-phosphate
  modified_base 16: mod_base = OTHER; note = 2'-deoxy-2'-fluorocytidine-3'-phosphate
  modified_base 17: mod_base = OTHER; note = 2'-O-methyladenosine-3'-phosphate
  modified_base 18: mod_base = OTHER; note = 2'-deoxy-2'-fluoroadenosine-3'-phosphate
  modified_base 19: mod_base = OTHER; note = 2'-O-methylcytidine-3'-phosphate
  modified_base 20: mod_base = OTHER; note = 2'-deoxy-2'-fluorouridine-3'-phosphate
  modified_base 21: mod_base = OTHER; note = 2'-O-methylguanosine-3'-phosphorothioate
  modified_base 22: mod_base = OTHER; note = 2'-deoxy-2'-fluoroadenosine-3'-phosphorothioate
  modified_base 23: mod_base = OTHER; note = 2'-O-methyladenosine
tttaagaccatgtcccaactgaa

SEQ ID NO: 1062 - RNA, 23 nt, synthetic construct
  source 1..23: mol_type = other RNA
  modified_base 1: mod_base = OTHER; note = 2'-O-methyluridine-3'-phosphate
  modified_base 2: mod_base = OTHER; note = 2'-deoxy-2'-fluorouridine-3'-phosphate
  modified_base 3: mod_base = OTHER; note = 2'-O-methyluridine-3'-phosphate
  modified_base 4: mod_base = OTHER; note = 2'-deoxy-2'-fluoroguanosine-3'-phosphate
  modified_base 5: mod_base = OTHER; note = 2'-O-methyladenosine-3'-phosphate
  modified_base 6: mod_base = OTHER; note = 2'-deoxy-2'-fluoroadenosine-3'-phosphate
  modified_base 7: mod_base = OTHER; note = 2'-O-methyladenosine-3'-phosphate
  modified_base 8: mod_base = OTHER; note = 2'-deoxy-2'-fluorouridine-3'-phosphate
  modified_base 9: mod_base = OTHER; note = 2'-O-methyladenosine-3'-phosphate
  modified_base 10: mod_base = OTHER; note = 2'-deoxy-2'-fluorouridine-3'-phosphate
  modified_base 11: mod_base = OTHER; note = 2'-O-methylguanosine-3'-phosphate
  modified_base 12: mod_base = OTHER; note = 2'-O-methyluridine-3'-phosphate
  modified_base 13: mod_base = OTHER; note = 2'-O-methylcytidine-3'-phosphate
  modified_base 14: mod_base = OTHER; note = 2'-deoxy-2'-fluoroadenosine-3'-phosphate
  modified_base 15: mod_base = OTHER; note = 2'-O-methyluridine-3'-phosphate
  modified_base 16: mod_base = OTHER; note = 2'-deoxy-2'-fluorouridine-3'-phosphate
  modified_base 17: mod_base = OTHER; note = 2'-O-methyladenosine-3'-phosphate
  modified_base 18: mod_base = OTHER; note = 2'-deoxy-2'-fluoroadenosine-3'-phosphate
  modified_base 19: mod_base = OTHER; note = 2'-O-methyluridine-3'-phosphate
  modified_base 20: mod_base = OTHER; note = 2'-deoxy-2'-fluorouridine-3'-phosphate
  modified_base 21: mod_base = OTHER; note = 2'-O-methyluridine-3'-phosphorothioate
  modified_base 22: mod_base = OTHER; note = 2'-deoxy-2'-fluoroguanosine-3'-phosphorothioate
  modified_base 23: mod_base = OTHER; note = 2'-O-methylguanosine
tttgaaatatgtcattaatttgg

SEQ ID NO: 1063 - RNA, 23 nt, synthetic construct
  source 1..23: mol_type = other RNA
  modified_base 1: mod_base = OTHER; note = 2'-O-methyluridine-3'-phosphate
  modified_base 2: mod_base = OTHER; note = 2'-deoxy-2'-fluoroadenosine-3'-phosphate
  modified_base 3: mod_base = OTHER; note = 2'-O-methylguanosine-3'-phosphate
  modified_base 4: mod_base = OTHER; note = 2'-deoxy-2'-fluoroadenosine-3'-phosphate
  modified_base 5: mod_base = OTHER; note = 2'-O-methyluridine-3'-phosphate
  modified_base 6: mod_base = OTHER; note = 2'-deoxy-2'-fluorocytidine-3'-phosphate
  modified_base 7: mod_base = OTHER; note = 2'-O-methyladenosine-3'-phosphate
  modified_base 8: mod_base = OTHER; note = 2'-deoxy-2'-fluorouridine-3'-phosphate
  modified_base 9: mod_base = OTHER; note = 2'-O-methyladenosine-3'-phosphate
  modified_base 10: mod_base = OTHER; note = 2'-deoxy-2'-fluoroadenosine-3'-phosphate
  modified_base 11: mod_base = OTHER; note = 2'-O-methyladenosine-3'-phosphate
  modified_base 12: mod_base = OTHER; note = 2'-O-methyladenosine-3'-phosphate
  modified_base 13: mod_base = OTHER; note = 2'-O-methyladenosine-3'-phosphate
  modified_base 14: mod_base = OTHER; note = 2'-deoxy-2'-fluoroguanosine-3'-phosphate
  modified_base 15: mod_base = OTHER; note = 2'-O-methyladenosine-3'-phosphate
  modified_base 16: mod_base = OTHER; note = 2'-deoxy-2'-fluorocytidine-3'-phosphate
  modified_base 17: mod_base = OTHER; note = 2'-O-methyluridine-3'-phosphate
  modified_base 18: mod_base = OTHER; note = 2'-deoxy-2'-fluoroguanosine-3'-phosphate
  modified_base 19: mod_base = OTHER; note = 2'-O-methyladenosine-3'-phosphate
  modified_base 20: mod_base = OTHER; note = 2'-deoxy-2'-fluorouridine-3'-phosphate
  modified_base 21: mod_base = OTHER; note = 2'-O-methylcytidine-3'-phosphorothioate
  modified_base 22: mod_base = OTHER; note = 2'-deoxy-2'-fluoroadenosine-3'-phosphorothioate
  modified_base 23: mod_base = OTHER; note = 2'-O-methyladenosine
tagatcataaaaagactgatcaa

SEQ ID NO: 1064 - RNA, 23 nt, synthetic construct
  source 1..23: mol_type = other RNA
  modified_base 1: mod_base = OTHER; note = 2'-O-methyluridine-3'-phosphate
  modified_base 2: mod_base = OTHER; note = 2'-deoxy-2'-fluorouridine-3'-phosphate
  modified_base 3: mod_base = OTHER; note = 2'-O-methyluridine-3'-phosphate
  modified_base 4: mod_base = OTHER; note = 2'-deoxy-2'-fluoroguanosine-3'-phosphate
  modified_base 5: mod_base = OTHER; note = 2'-O-methyladenosine-3'-phosphate
  modified_base 6: mod_base = OTHER; note = 2'-deoxy-2'-fluorocytidine-3'-phosphate
  modified_base 7: mod_base = OTHER; note = 2'-O-methyluridine-3'-phosphate
  modified_base 8: mod_base = OTHER; note = 2'-deoxy-2'-fluorouridine-3'-phosphate
  modified_base 9: mod_base = OTHER; note = 2'-O-methylguanosine-3'-phosphate
  modified_base 10: mod_base = OTHER; note = 2'-deoxy-2'-fluorouridine-3'-phosphate
  modified_base 11: mod_base = OTHER; note = 2'-O-methyladenosine-3'-phosphate
  modified_base 12: mod_base = OTHER; note = 2'-O-methylguanosine-3'-phosphate
  modified_base 13: mod_base = OTHER; note = 2'-O-methyluridine-3'-phosphate
  modified_base 14: mod_base = OTHER; note = 2'-deoxy-2'-fluorouridine-3'-phosphate
  modified_base 15: mod_base = OTHER; note = 2'-O-methyluridine-3'-phosphate
  modified_base 16: mod_base = OTHER; note = 2'-deoxy-2'-fluoroadenosine-3'-phosphate
  modified_base 17: mod_base = OTHER; note = 2'-O-methyluridine-3'-phosphate
  modified_base 18: mod_base = OTHER; note = 2'-deoxy-2'-fluoroadenosine-3'-phosphate
  modified_base 19: mod_base = OTHER; note = 2'-O-methyluridine-3'-phosphate
  modified_base 20: mod_base = OTHER; note = 2'-deoxy-2'-fluoroguanosine-3'-phosphate
  modified_base 21: mod_base = OTHER; note = 2'-O-methyluridine-3'-phosphorothioate
  modified_base 22: mod_base = OTHER; note = 2'-deoxy-2'-fluoroadenosine-3'-phosphorothioate
  modified_base 23: mod_base = OTHER; note = 2'-O-methylguanosine
tttgacttgtagtttatatgtag

SEQ ID NO: 1065 - RNA, 23 nt, synthetic construct
  source 1..23: mol_type = other RNA
  modified_base 1: mod_base = OTHER; note = 2'-O-methyladenosine-3'-phosphate
  modified_base 2: mod_base = OTHER; note = 2'-deoxy-2'-fluoroadenosine-3'-phosphate
  modified_base 3: mod_base = OTHER; note = 2'-O-methyluridine-3'-phosphate
  modified_base 4: mod_base = OTHER; note = 2'-deoxy-2'-fluoroadenosine-3'-phosphate
  modified_base 5: mod_base = OTHER; note = 2'-O-methyladenosine-3'-phosphate
  modified_base 6: mod_base = OTHER; note = 2'-deoxy-2'-fluorocytidine-3'-phosphate
  modified_base 7: mod_base = OTHER; note = 2'-O-methyluridine-3'-phosphate
  modified_base 8: mod_base = OTHER; note = 2'-deoxy-2'-fluoroadenosine-3'-phosphate
  modified_base 9: mod_base = OTHER; note = 2'-O-methylguanosine-3'-phosphate
  modified_base 10: mod_base = OTHER; note = 2'-deoxy-2'-fluoroadenosine-3'-phosphate
  modified_base 11: mod_base = OTHER; note = 2'-O-methylguanosine-3'-phosphate
  modified_base 12: mod_base = OTHER; note = 2'-O-methylguanosine-3'-phosphate
  modified_base 13: mod_base = OTHER; note = 2'-O-methyladenosine-3'-phosphate
  modified_base 14: mod_base = OTHER; note = 2'-deoxy-2'-fluoroadenosine-3'-phosphate
  modified_base 15: mod_base = OTHER; note = 2'-O-methylcytidine-3'-phosphate
  modified_base 16: mod_base = OTHER; note = 2'-deoxy-2'-fluoroadenosine-3'-phosphate
  modified_base 17: mod_base = OTHER; note = 2'-O-methyladenosine-3'-phosphate
  modified_base 18: mod_base = OTHER; note = 2'-deoxy-2'-fluorouridine-3'-phosphate
  modified_base 19: mod_base = OTHER; note = 2'-O-methyladenosine-3'-phosphate
  modified_base 20: mod_base = OTHER; note = 2'-deoxy-2'-fluoroadenosine-3'-phosphate
  modified_base 21: mod_base = OTHER; note = 2'-O-methyladenosine-3'-phosphorothioate
  modified_base 22: mod_base = OTHER; note = 2'-deoxy-2'-fluoroadenosine-3'-phosphorothioate
  modified_base 23: mod_base = OTHER; note = 2'-O-methyladenosine
aataactagaggaacaataaaaa

SEQ ID NO: 1066 - RNA, 23 nt, synthetic construct
  source 1..23: mol_type = other RNA
  modified_base 1: mod_base = OTHER; note = 2'-O-methyluridine-3'-phosphate
  modified_base 2: mod_base = OTHER; note = 2'-deoxy-2'-fluorouridine-3'-phosphate
  modified_base 3: mod_base = OTHER; note = 2'-O-methyluridine-3'-phosphate
  modified_base 4: mod_base = OTHER; note = 2'-deoxy-2'-fluoroadenosine-3'-phosphate
  modified_base 5: mod_base = OTHER; note = 2'-O-methylcytidine-3'-phosphate
  modified_base 6: mod_base = OTHER; note = 2'-deoxy-2'-fluoroadenosine-3'-phosphate
  modified_base 7: mod_base = OTHER; note = 2'-O-methyluridine-3'-phosphate
  modified_base 8: mod_base = OTHER; note = 2'-deoxy-2'-fluorocytidine-3'-phosphate
  modified_base 9: mod_base = OTHER; note = 2'-O-methylguanosine-3'-phosphate
  modified_base 10: mod_base = OTHER; note = 2'-deoxy-2'-fluorouridine-3'-phosphate
  modified_base 11: mod_base = OTHER; note = 2'-O-methylcytidine-3'-phosphate
  modified_base 12: mod_base = OTHER; note = 2'-O-methyluridine-3'-phosphate
  modified_base 13: mod_base = OTHER; note = 2'-O-methyladenosine-3'-phosphate
  modified_base 14: mod_base = OTHER; note = 2'-deoxy-2'-fluoroadenosine-3'-phosphate
  modified_base 15: mod_base = OTHER; note = 2'-O-methylcytidine-3'-phosphate
  modified_base 16: mod_base = OTHER; note = 2'-deoxy-2'-fluoroadenosine-3'-phosphate
  modified_base 17: mod_base = OTHER; note = 2'-O-methyluridine-3'-phosphate
  modified_base 18: mod_base = OTHER; note = 2'-deoxy-2'-fluoroadenosine-3'-phosphate
  modified_base 19: mod_base = OTHER; note = 2'-O-methylguanosine-3'-phosphate
  modified_base 20: mod_base = OTHER; note = 2'-deoxy-2'-fluorocytidine-3'-phosphate
  modified_base 21: mod_base = OTHER; note = 2'-O-methyladenosine-3'-phosphorothioate
  modified_base 22: mod_base = OTHER; note = 2'-deoxy-2'-fluoroadenosine-3'-phosphorothioate
  modified_base 23: mod_base = OTHER; note = 2'-O-methyladenosine
tttacatcgtctaacatagcaaa

SEQ ID NO: 1067 - RNA, 23 nt, synthetic construct
  source 1..23: mol_type = other RNA
  modified_base 1: mod_base = OTHER; note = 2'-O-methyladenosine-3'-phosphate
  modified_base 2: mod_base = OTHER; note = 2'-deoxy-2'-fluoroadenosine-3'-phosphate
  modified_base 3: mod_base = OTHER; note = 2'-O-methylguanosine-3'-phosphate
  modified_base 4: mod_base = OTHER; note = 2'-deoxy-2'-fluorouridine-3'-phosphate
  modified_base 5: mod_base = OTHER; note = 2'-O-methylcytidine-3'-phosphate
  modified_base 6: mod_base = OTHER; note = 2'-deoxy-2'-fluorouridine-3'-phosphate
  modified_base 7: mod_base = OTHER; note = 2'-O-methyluridine-3'-phosphate
  modified_base 8: mod_base = OTHER; note = 2'-deoxy-2'-fluorouridine-3'-phosphate
  modified_base 9: mod_base = OTHER; note = 2'-O-methyladenosine-3'-phosphate
  modified_base 10: mod_base = OTHER; note = 2'-deoxy-2'-fluoroadenosine-3'-phosphate
  modified_base 11: mod_base = OTHER; note = 2'-O-methylguanosine-3'-phosphate
  modified_base 12: mod_base = OTHER; note = 2'-O-methyladenosine-3'-phosphate
  modified_base 13: mod_base = OTHER; note = 2'-O-methylcytidine-3'-phosphate
  modified_base 14: mod_base = OTHER; note = 2'-deoxy-2'-fluorocytidine-3'-phosphate
  modified_base 15: mod_base = OTHER; note = 2'-O-methyladenosine-3'-phosphate
  modified_base 16: mod_base = OTHER; note = 2'-deoxy-2'-fluorouridine-3'-phosphate
  modified_base 17: mod_base = OTHER; note = 2'-O-methylguanosine-3'-phosphate
  modified_base 18: mod_base = OTHER; note = 2'-deoxy-2'-fluorouridine-3'-phosphate
  modified_base 19: mod_base = OTHER; note = 2'-O-methylcytidine-3'-phosphate
  modified_base 20: mod_base = OTHER; note = 2'-deoxy-2'-fluorocytidine-3'-phosphate
  modified_base 21: mod_base = OTHER; note = 2'-O-methylcytidine-3'-phosphorothioate
  modified_base 22: mod_base = OTHER; note = 2'-deoxy-2'-fluoroadenosine-3'-phosphorothioate
  modified_base 23: mod_base = OTHER; note = 2'-O-methyladenosine
aagtctttaagaccatgtcccaa

SEQ ID NO: 1068 - RNA, 23 nt, synthetic construct
  source 1..23: mol_type = other RNA
  modified_base 1: mod_base = OTHER; note = 2'-O-methyluridine-3'-phosphate
  modified_base 2: mod_base = OTHER; note = 2'-deoxy-2'-fluorouridine-3'-phosphate
  modified_base 3: mod_base = OTHER; note = 2'-O-methylguanosine-3'-phosphate
  modified_base 4: mod_base = OTHER; note = 2'-deoxy-2'-fluoroadenosine-3'-phosphate
  modified_base 5: mod_base = OTHER; note = 2'-O-methylguanosine-3'-phosphate
  modified_base 6: mod_base = OTHER; note = 2'-deoxy-2'-fluorouridine-3'-phosphate
  modified_base 7: mod_base = OTHER; note = 2'-O-methyluridine-3'-phosphate
  modified_base 8: mod_base = OTHER; note = 2'-deoxy-2'-fluorouridine-3'-phosphate
  modified_base 9: mod_base = OTHER; note = 2'-O-methyluridine-3'-phosphate
  modified_base 10: mod_base = OTHER; note = 2'-deoxy-2'-fluorouridine-3'-phosphate
  modified_base 11: mod_base = OTHER; note = 2'-O-methylguanosine-3'-phosphate
  modified_base 12: mod_base = OTHER; note = 2'-O-methyladenosine-3'-phosphate
  modified_base 13: mod_base = OTHER; note = 2'-O-methyladenosine-3'-phosphate
  modified_base 14: mod_base = OTHER; note = 2'-deoxy-2'-fluoroadenosine-3'-phosphate
  modified_base 15: mod_base = OTHER; note = 2'-O-methyluridine-3'-phosphate
  modified_base 16: mod_base = OTHER; note = 2'-deoxy-2'-fluoroadenosine-3'-phosphate
  modified_base 17: mod_base = OTHER; note = 2'-O-methyluridine-3'-phosphate
  modified_base 18: mod_base = OTHER; note = 2'-deoxy-2'-fluoroguanosine-3'-phosphate
  modified_base 19: mod_base = OTHER; note = 2'-O-methyluridine-3'-phosphate
  modified_base 20: mod_base = OTHER; note = 2'-deoxy-2'-fluorocytidine-3'-phosphate
  modified_base 21: mod_base = OTHER; note = 2'-O-methyladenosine-3'-phosphorothioate
  modified_base 22: mod_base = OTHER; note = 2'-deoxy-2'-fluorouridine-3'-phosphorothioate
  modified_base 23: mod_base = OTHER; note = 2'-O-methyluridine
ttgagtttttgaaatatgtcatt

SEQ ID NO: 1069 - RNA, 23 nt, synthetic construct
  source 1..23: mol_type = other RNA
  modified_base 1: mod_base = OTHER; note = 2'-O-methyladenosine-3'-phosphate
  modified_base 2: mod_base = OTHER; note = 2'-deoxy-2'-fluorouridine-3'-phosphate
  modified_base 3: mod_base = OTHER; note = 2'-O-methyladenosine-3'-phosphate
  modified_base 4: mod_base = OTHER; note = 2'-deoxy-2'-fluoroguanosine-3'-phosphate
  modified_base 5: mod_base = OTHER; note = 2'-O-methyladenosine-3'-phosphate
  modified_base 6: mod_base = OTHER; note = 2'-deoxy-2'-fluorouridine-3'-phosphate
  modified_base 7: mod_base = OTHER; note = 2'-O-methylcytidine-3'-phosphate
  modified_base 8: mod_base = OTHER; note = 2'-deoxy-2'-fluoroadenosine-3'-phosphate
  modified_base 9: mod_base = OTHER; note = 2'-O-methyluridine-3'-phosphate
  modified_base 10: mod_base = OTHER; note = 2'-deoxy-2'-fluoroadenosine-3'-phosphate
  modified_base 11: mod_base = OTHER; note = 2'-O-methyladenosine-3'-phosphate
  modified_base 12: mod_base = OTHER; note = 2'-O-methyladenosine-3'-phosphate
  modified_base 13: mod_base = OTHER; note = 2'-O-methyladenosine-3'-phosphate
  modified_base 14: mod_base = OTHER; note = 2'-deoxy-2'-fluoroadenosine-3'-phosphate
  modified_base 15: mod_base = OTHER; note = 2'-O-methylguanosine-3'-phosphate
  modified_base 16: mod_base = OTHER; note = 2'-deoxy-2'-fluoroadenosine-3'-phosphate
  modified_base 17: mod_base = OTHER; note = 2'-O-methylcytidine-3'-phosphate
  modified_base 18: mod_base = OTHER; note = 2'-deoxy-2'-fluorouridine-3'-phosphate
  modified_base 19: mod_base = OTHER; note = 2'-O-methylguanosine-3'-phosphate
  modified_base 20: mod_base = OTHER; note = 2'-deoxy-2'-fluoroadenosine-3'-phosphate
  modified_base 21: mod_base = OTHER; note = 2'-O-methyluridine-3'-phosphorothioate
  modified_base 22: mod_base = OTHER; note = 2'-deoxy-2'-fluorocytidine-3'-phosphorothioate
  modified_base 23: mod_base = OTHER; note = 2'-O-methyladenosine
atagatcataaaaagactgatca

SEQ ID NO: 1070 - RNA, 23 nt, synthetic construct
  source 1..23: mol_type = other RNA
  modified_base 1: mod_base = OTHER; note = 2'-O-methyluridine-3'-phosphate
  modified_base 2: mod_base = OTHER; note = 2'-deoxy-2'-fluorouridine-3'-phosphate
  modified_base 3: mod_base = OTHER; note = 2'-O-methyluridine-3'-phosphate
  modified_base 4: mod_base = OTHER; note = 2'-deoxy-2'-fluorouridine-3'-phosphate
  modified_base 5: mod_base = OTHER; note = 2'-O-methylguanosine-3'-phosphate
  modified_base 6: mod_base = OTHER; note = 2'-deoxy-2'-fluoroadenosine-3'-phosphate
  modified_base 7: mod_base = OTHER; note = 2'-O-methylcytidine-3'-phosphate
  modified_base 8: mod_base = OTHER; note = 2'-deoxy-2'-fluorouridine-3'-phosphate
  modified_base 9: mod_base = OTHER; note = 2'-O-methyluridine-3'-phosphate
  modified_base 10: mod_base = OTHER; note = 2'-deoxy-2'-fluoroguanosine-3'-phosphate
  modified_base 11: mod_base = OTHER; note = 2'-O-methyluridine-3'-phosphate
  modified_base 12: mod_base = OTHER; note = 2'-O-methyladenosine-3'-phosphate
  modified_base 13: mod_base = OTHER; note = 2'-O-methylguanosine-3'-phosphate
  modified_base 14: mod_base = OTHER; note = 2'-deoxy-2'-fluorouridine-3'-phosphate
  modified_base 15: mod_base = OTHER; note = 2'-O-methyluridine-3'-phosphate
  modified_base 16: mod_base = OTHER; note = 2'-deoxy-2'-fluorouridine-3'-phosphate
  modified_base 17: mod_base = OTHER; note = 2'-O-methyladenosine-3'-phosphate
  modified_base 18: mod_base = OTHER; note = 2'-deoxy-2'-fluorouridine-3'-phosphate
  modified_base 19: mod_base = OTHER; note = 2'-O-methyladenosine-3'-phosphate
  modified_base 20: mod_base = OTHER; note = 2'-deoxy-2'-fluorouridine-3'-phosphate
  modified_base 21: mod_base = OTHER; note = 2'-O-methylguanosine-3'-phosphorothioate
  modified_base 22: mod_base = OTHER; note = 2'-deoxy-2'-fluorouridine-3'-phosphorothioate
  modified_base 23: mod_base = OTHER; note = 2'-O-methyladenosine
ttttgacttgtagtttatatgta

SEQ ID NO: 1071 - RNA, 23 nt, synthetic construct
  source 1..23: mol_type = other RNA
  modified_base 1: mod_base = OTHER; note = 2'-O-methyladenosine-3'-phosphate
  modified_base 2: mod_base = OTHER; note = 2'-deoxy-2'-fluoroadenosine-3'-phosphate
  modified_base 3: mod_base = OTHER; note = 2'-O-methylguanosine-3'-phosphate
  modified_base 4: mod_base = OTHER; note = 2'-deoxy-2'-fluorouridine-3'-phosphate
  modified_base 5: mod_base = OTHER; note = 2'-O-methyluridine-3'-phosphate
  modified_base 6: mod_base = OTHER; note = 2'-deoxy-2'-fluorouridine-3'-phosphate
  modified_base 7: mod_base = OTHER; note = 2'-O-methyluridine-3'-phosphate
  modified_base 8: mod_base = OTHER; note = 2'-deoxy-2'-fluoroguanosine-3'-phosphate
  modified_base 9: mod_base = OTHER; note = 2'-O-methyladenosine-3'-phosphate
  modified_base 10: mod_base = OTHER; note = 2'-deoxy-2'-fluoroguanosine-3'-phosphate
  modified_base 11: mod_base = OTHER; note = 2'-O-methyluridine-3'-phosphate
  modified_base 12: mod_base = OTHER; note = 2'-O-methyluridine-3'-phosphate
  modified_base 13: mod_base = OTHER; note = 2'-O-methylguanosine-3'-phosphate
  modified_base 14: mod_base = OTHER; note = 2'-deoxy-2'-fluoroadenosine-3'-phosphate
  modified_base 15: mod_base = OTHER; note = 2'-O-methylguanosine-3'-phosphate
  modified_base 16: mod_base = OTHER; note = 2'-deoxy-2'-fluorouridine-3'-phosphate
  modified_base 17: mod_base = OTHER; note = 2'-O-methyluridine-3'-phosphate
  modified_base 18: mod_base = OTHER; note = 2'-deoxy-2'-fluorocytidine-3'-phosphate
  modified_base 19: mod_base = OTHER; note = 2'-O-methyladenosine-3'-phosphate
  modified_base 20: mod_base = OTHER; note = 2'-deoxy-2'-fluoroadenosine-3'-phosphate
  modified_base 21: mod_base = OTHER; note = 2'-O-methylguanosine-3'-phosphorothioate
  modified_base 22: mod_base = OTHER; note = 2'-deoxy-2'-fluorouridine-3'-phosphorothioate
  modified_base 23: mod_base = OTHER; note = 2'-O-methylguanosine
aagttttgagttgagttcaagtg

SEQ ID NO: 1072 - RNA, 23 nt, synthetic construct
  source 1..23: mol_type = other RNA
  modified_base 1: mod_base = OTHER; note = 2'-O-methyluridine-3'-phosphate
  modified_base 2: mod_base = OTHER; note = 2'-deoxy-2'-fluorouridine-3'-phosphate
  modified_base 3: mod_base = OTHER; note = 2'-O-methyluridine-3'-phosphate
  modified_base 4: mod_base = OTHER; note = 2'-deoxy-2'-fluorocytidine-3'-phosphate
  modified_base 5: mod_base = OTHER; note = 2'-O-methyladenosine-3'-phosphate
  modified_base 6: mod_base = OTHER; note = 2'-deoxy-2'-fluorocytidine-3'-phosphate
  modified_base 7: mod_base = OTHER; note = 2'-O-methyluridine-3'-phosphate
  modified_base 8: mod_base = OTHER; note = 2'-deoxy-2'-fluorouridine-3'-phosphate
  modified_base 9: mod_base = OTHER; note = 2'-O-methyluridine-3'-phosphate
  modified_base 10: mod_base = OTHER; note = 2'-deoxy-2'-fluorouridine-3'-phosphate
  modified_base 11: mod_base = OTHER; note = 2'-O-methyluridine-3'-phosphate
  modified_base 12: mod_base = OTHER; note = 2'-O-methylguanosine-3'-phosphate
  modified_base 13: mod_base = OTHER; note = 2'-O-methyluridine-3'-phosphate
  modified_base 14: mod_base = OTHER; note = 2'-deoxy-2'-fluorouridine-3'-phosphate
  modified_base 15: mod_base = OTHER; note = 2'-O-methylguanosine-3'-phosphate
  modified_base 16: mod_base = OTHER; note = 2'-deoxy-2'-fluoroadenosine-3'-phosphate
  modified_base 17: mod_base = OTHER; note = 2'-O-methyladenosine-3'-phosphate
  modified_base 18: mod_base = OTHER; note = 2'-deoxy-2'-fluoroguanosine-3'-phosphate
  modified_base 19: mod_base = OTHER; note = 2'-O-methyluridine-3'-phosphate
  modified_base 20: mod_base = OTHER; note = 2'-deoxy-2'-fluoroadenosine-3'-phosphate
  modified_base 21: mod_base = OTHER; note = 2'-O-methylguanosine-3'-phosphorothioate
  modified_base 22: mod_base = OTHER; note = 2'-deoxy-2'-fluoroadenosine-3'-phosphorothioate
  modified_base 23: mod_base = OTHER; note = 2'-O-methyladenosine
tttcactttttgttgaagtagaa

SEQ ID NO: 1073 - RNA, 23 nt, synthetic construct
  source 1..23: mol_type = other RNA
  modified_base 1: mod_base = OTHER; note = 2'-O-methyluridine-3'-phosphate
  modified_base 2: mod_base = OTHER; note = 2'-deoxy-2'-fluorouridine-3'-phosphate
  modified_base 3: mod_base = OTHER; note = 2'-O-methyladenosine-3'-phosphate
  modified_base 4: mod_base = OTHER; note = 2'-deoxy-2'-fluoroadenosine-3'-phosphate
  modified_base 5: mod_base = OTHER; note = 2'-O-methylguanosine-3'-phosphate
  modified_base 6: mod_base = OTHER; note = 2'-deoxy-2'-fluorouridine-3'-phosphate
  modified_base 7: mod_base = OTHER; note = 2'-O-methyluridine-3'-phosphate
  modified_base 8: mod_base = OTHER; note = 2'-deoxy-2'-fluoroadenosine-3'-phosphate
  modified_base 9: mod_base = OTHER; note = 2'-O-methylguanosine-3'-phosphate
  modified_base 10: mod_base = OTHER; note = 2'-deoxy-2'-fluorouridine-3'-phosphate
  modified_base 11: mod_base = OTHER; note = 2'-O-methyluridine-3'-phosphate
  modified_base 12: mod_base = OTHER; note = 2'-O-methyladenosine-3'-phosphate
  modified_base 13: mod_base = OTHER; note = 2'-O-methylguanosine-3'-phosphate
  modified_base 14: mod_base = OTHER; note = 2'-deoxy-2'-fluorouridine-3'-phosphate
  modified_base 15: mod_base = OTHER; note = 2'-O-methyluridine-3'-phosphate
  modified_base 16: mod_base = OTHER; note = 2'-deoxy-2'-fluoroguanosine-3'-phosphate
  modified_base 17: mod_base = OTHER; note = 2'-O-methylcytidine-3'-phosphate
  modified_base 18: mod_base = OTHER; note = 2'-deoxy-2'-fluorouridine-3'-phosphate
  modified_base 19: mod_base = OTHER; note = 2'-O-methylcytidine-3'-phosphate
  modified_base 20: mod_base = OTHER; note = 2'-deoxy-2'-fluorouridine-3'-phosphate
  modified_base 21: mod_base = OTHER; note = 2'-O-methyluridine-3'-phosphorothioate
  modified_base 22: mod_base = OTHER; note = 2'-deoxy-2'-fluorocytidine-3'-phosphorothioate
  modified_base 23: mod_base = OTHER; note = 2'-O-methyluridine
ttaagttagttagttgctcttct

SEQ ID NO: 1074 - RNA, 23 nt, synthetic construct
  source 1..23: mol_type = other RNA
  modified_base 1: mod_base = OTHER; note = 2'-O-methyluridine-3'-phosphate
  modified_base 2: mod_base = OTHER; note = 2'-deoxy-2'-fluorouridine-3'-phosphate
  modified_base 3: mod_base = OTHER; note = 2'-O-methyluridine-3'-phosphate
  modified_base 4: mod_base = OTHER; note = 2'-deoxy-2'-fluoroguanosine-3'-phosphate
  modified_base 5: mod_base = OTHER; note = 2'-O-methyladenosine-3'-phosphate
  modified_base 6: mod_base = OTHER; note = 2'-deoxy-2'-fluorouridine-3'-phosphate
  modified_base 7: mod_base = OTHER; note = 2'-O-methylguanosine-3'-phosphate
  modified_base 8: mod_base = OTHER; note = 2'-deoxy-2'-fluorocytidine-3'-phosphate
  modified_base 9: mod_base = OTHER; note = 2'-O-methyluridine-3'-phosphate
  modified_base 10: mod_base = OTHER; note = 2'-deoxy-2'-fluoroadenosine-3'-phosphate
  modified_base 11: mod_base = OTHER; note = 2'-O-methyluridine-3'-phosphate
  modified_base 12: mod_base = OTHER; note = 2'-O-methyluridine-3'-phosphate
  modified_base 13: mod_base = OTHER; note = 2'-O-methyladenosine-3'-phosphate
  modified_base 14: mod_base = OTHER; note = 2'-deoxy-2'-fluorouridine-3'-phosphate
  modified_base 15: mod_base = OTHER; note = 2'-O-methylcytidine-3'-phosphate
  modified_base 16: mod_base = OTHER; note = 2'-deoxy-2'-fluorouridine-3'-phosphate
  modified_base 17: mod_base = OTHER; note = 2'-O-methyluridine-3'-phosphate
  modified_base 18: mod_base = OTHER; note = 2'-deoxy-2'-fluoroguanosine-3'-phosphate
  modified_base 19: mod_base = OTHER; note = 2'-O-methyluridine-3'-phosphate
  modified_base 20: mod_base = OTHER; note = 2'-deoxy-2'-fluorouridine-3'-phosphate
  modified_base 21: mod_base = OTHER; note = 2'-O-methyluridine-3'-phosphorothioate
  modified_base 22: mod_base = OTHER; note = 2'-deoxy-2'-fluorouridine-3'-phosphorothioate
  modified_base 23: mod_base = OTHER; note = 2'-O-methyluridine
tttgatgctattatcttgttttt

SEQ ID NO: 1075 - RNA, 23 nt, synthetic construct
  source 1..23: mol_type = other RNA
  modified_base 1: mod_base = OTHER; note = 2'-O-methyladenosine-3'-phosphate
  modified_base 2: mod_base = OTHER; note = 2'-deoxy-2'-fluorouridine-3'-phosphate
  modified_base 3: mod_base = OTHER; note = 2'-O-methyluridine-3'-phosphate
  modified_base 4: mod_base = OTHER; note = 2'-deoxy-2'-fluorouridine-3'-phosphate
  modified_base 5: mod_base = OTHER; note = 2'-O-methylcytidine-3'-phosphate
  modified_base 6: mod_base = OTHER; note = 2'-deoxy-2'-fluorouridine-3'-phosphate
  modified_base 7: mod_base = OTHER; note = 2'-O-methyluridine-3'-phosphate
  modified_base 8: mod_base = OTHER; note = 2'-deoxy-2'-fluorouridine-3'-phosphate
  modified_base 9: mod_base = OTHER; note = 2'-O-methyluridine-3'-phosphate
  modified_base 10: mod_base = OTHER; note = 2'-deoxy-2'-fluoroadenosine-3'-phosphate
  modified_base 11: mod_base = OTHER; note = 2'-O-methyluridine-3'-phosphate
  modified_base 12: mod_base = OTHER; note = 2'-O-methyluridine-3'-phosphate
  modified_base 13: mod_base = OTHER; note = 2'-O-methyluridine-3'-phosphate
  modified_base 14: mod_base = OTHER; note = 2'-deoxy-2'-fluoroguanosine-3'-phosphate
  modified_base 15: mod_base = OTHER; note = 2'-O-methyladenosine-3'-phosphate
  modified_base 16: mod_base = OTHER; note = 2'-deoxy-2'-fluorocytidine-3'-phosphate
  modified_base 17: mod_base = OTHER; note = 2'-O-methyluridine-3'-phosphate
  modified_base 18: mod_base = OTHER; note = 2'-deoxy-2'-fluoroadenosine-3'-phosphate
  modified_base 19: mod_base = OTHER; note = 2'-O-methyluridine-3'-phosphate
  modified_base 20: mod_base = OTHER; note = 2'-deoxy-2'-fluoroguanosine-3'-phosphate
  modified_base 21: mod_base = OTHER; note = 2'-O-methylcytidine-3'-phosphorothioate
  modified_base 22: mod_base = OTHER; note = 2'-deoxy-2'-fluorouridine-3'-phosphorothioate
  modified_base 23: mod_base = OTHER; note = 2'-O-methylguanosine
atttcttttatttgactatgctg

SEQ ID NO: 1076 - RNA, 23 nt, synthetic construct
  source 1..23: mol_type = other RNA
  modified_base 1: mod_base = OTHER; note = 2'-O-methyluridine-3'-phosphate
  modified_base 2: mod_base = OTHER; note = 2'-deoxy-2'-fluorouridine-3'-phosphate
  modified_base 3: mod_base = OTHER; note = 2'-O-methyluridine-3'-phosphate
  modified_base 4: mod_base = OTHER; note = 2'-deoxy-2'-fluorouridine-3'-phosphate
  modified_base 5: mod_base = OTHER; note = 2'-O-methyluridine-3'-phosphate
  modified_base 6: mod_base = OTHER; note = 2'-deoxy-2'-fluoroguanosine-3'-phosphate
  modified_base 7: mod_base = OTHER; note = 2'-O-methyladenosine-3'-phosphate
  modified_base 8: mod_base = OTHER; note = 2'-deoxy-2'-fluorocytidine-3'-phosphate
  modified_base 9: mod_base = OTHER; note = 2'-O-methyluridine-3'-phosphate
  modified_base 10: mod_base = OTHER; note = 2'-deoxy-2'-fluorouridine-3'-phosphate
  modified_base 11: mod_base = OTHER; note = 2'-O-methylguanosine-3'-phosphate
  modified_base 12: mod_base = OTHER; note = 2'-O-methyluridine-3'-phosphate
  modified_base 13: mod_base = OTHER; note = 2'-O-methyladenosine-3'-phosphate
  modified_base 14: mod_base = OTHER; note = 2'-deoxy-2'-fluoroguanosine-3'-phosphate
  modified_base 15: mod_base = OTHER; note = 2'-O-methyluridine-3'-phosphate
  modified_base 16: mod_base = OTHER; note = 2'-deoxy-2'-fluorouridine-3'-phosphate
  modified_base 17: mod_base = OTHER; note = 2'-O-methyluridine-3'-phosphate
  modified_base 18: mod_base = OTHER; note = 2'-deoxy-2'-fluoroadenosine-3'-phosphate
  modified_base 19: mod_base = OTHER; note = 2'-O-methyluridine-3'-phosphate
  modified_base 20: mod_base = OTHER; note = 2'-deoxy-2'-fluoroadenosine-3'-phosphate
  modified_base 21: mod_base = OTHER; note = 2'-O-methyluridine-3'-phosphorothioate
  modified_base 22: mod_base = OTHER; note = 2'-deoxy-2'-fluoroguanosine-3'-phosphorothioate
  modified_base 23: mod_base = OTHER; note = 2'-O-methyluridine
tttttgacttgtagtttatatgt

SEQ ID NO: 1077 - RNA, 23 nt, synthetic construct
  source 1..23: mol_type = other RNA
  modified_base 1: mod_base = OTHER; note = 2'-O-methyluridine-3'-phosphate
  modified_base 2: mod_base = OTHER; note = 2'-deoxy-2'-fluorouridine-3'-phosphate
  modified_base 3: mod_base = OTHER; note = 2'-O-methylcytidine-3'-phosphate
  modified_base 4: mod_base = OTHER; note = 2'-deoxy-2'-fluoroadenosine-3'-phosphate
  modified_base 5: mod_base = OTHER; note = 2'-O-methyladenosine-3'-phosphate
  modified_base 6: mod_base = OTHER; note = 2'-deoxy-2'-fluoroguanosine-3'-phosphate
  modified_base 7: mod_base = OTHER; note = 2'-O-methyluridine-3'-phosphate
  modified_base 8: mod_base = OTHER; note = 2'-deoxy-2'-fluorouridine-3'-phosphate
  modified_base 9: mod_base = OTHER; note = 2'-O-methyluridine-3'-phosphate
  modified_base 10: mod_base = OTHER; note = 2'-deoxy-2'-fluorouridine-3'-phosphate
  modified_base 11: mod_base = OTHER; note = 2'-O-methylguanosine-3'-phosphate
  modified_base 12: mod_base = OTHER; note = 2'-O-methyladenosine-3'-phosphate
  modified_base 13: mod_base = OTHER; note = 2'-O-methylguanosine-3'-phosphate
  modified_base 14: mod_base = OTHER; note = 2'-deoxy-2'-fluorouridine-3'-phosphate
  modified_base 15: mod_base = OTHER; note = 2'-O-methyluridine-3'-phosphate
  modified_base 16: mod_base = OTHER; note = 2'-deoxy-2'-fluoroguanosine-3'-phosphate
  modified_base 17: mod_base = OTHER; note = 2'-O-methyladenosine-3'-phosphate
  modified_base 18: mod_base = OTHER; note = 2'-deoxy-2'-fluoroguanosine-3'-phosphate
  modified_base 19: mod_base = OTHER; note = 2'-O-methyluridine-3'-phosphate
  modified_base 20: mod_base = OTHER; note = 2'-deoxy-2'-fluorouridine-3'-phosphate
  modified_base 21: mod_base = OTHER; note = 2'-O-methylcytidine-3'-phosphorothioate
  modified_base 22: mod_base = OTHER; note = 2'-deoxy-2'-fluoroadenosine-3'-phosphorothioate
  modified_base 23: mod_base = OTHER; note = 2'-O-methyladenosine
ttcaagttttgagttgagttcaa

SEQ ID NO: 1078 - RNA, 23 nt, synthetic construct
  source 1..23: mol_type = other RNA
  modified_base 1: mod_base = OTHER; note = 2'-O-methyladenosine-3'-phosphate
  modified_base 2: mod_base = OTHER; note = 2'-deoxy-2'-fluorouridine-3'-phosphate
  modified_base 3: mod_base = OTHER; note = 2'-O-methyluridine-3'-phosphate
  modified_base 4: mod_base = OTHER; note = 2'-deoxy-2'-fluorouridine-3'-phosphate
  modified_base 5: mod_base = OTHER; note = 2'-O-methylcytidine-3'-phosphate
  modified_base 6: mod_base = OTHER; note = 2'-deoxy-2'-fluoroadenosine-3'-phosphate
  modified_base 7: mod_base = OTHER; note = 2'-O-methylcytidine-3'-phosphate
  modified_base 8: mod_base = OTHER; note = 2'-deoxy-2'-fluorouridine-3'-phosphate
  modified_base 9: mod_base = OTHER; note = 2'-O-methyluridine-3'-phosphate
  modified_base 10: mod_base = OTHER; note = 2'-deoxy-2'-fluorouridine-3'-phosphate
  modified_base 11: mod_base = OTHER; note = 2'-O-methyluridine-3'-phosphate
  modified_base 12: mod_base = OTHER; note = 2'-O-methyluridine-3'-phosphate
  modified_base 13: mod_base = OTHER; note = 2'-O-methylguanosine-3'-phosphate
  modified_base 14: mod_base = OTHER; note = 2'-deoxy-2'-fluorouridine-3'-phosphate
  modified_base 15: mod_base = OTHER; note = 2'-O-methyluridine-3'-phosphate
  modified_base 16: mod_base = OTHER; note = 2'-deoxy-2'-fluoroguanosine-3'-phosphate
  modified_base 17: mod_base = OTHER; note = 2'-O-methyladenosine-3'-phosphate
  modified_base 18: mod_base = OTHER; note = 2'-deoxy-2'-fluoroadenosine-3'-phosphate
  modified_base 19: mod_base = OTHER; note = 2'-O-methylguanosine-3'-phosphate
  modified_base 20: mod_base = OTHER; note = 2'-deoxy-2'-fluorouridine-3'-phosphate
  modified_base 21: mod_base = OTHER; note = 2'-O-methyladenosine-3'-phosphorothioate
  modified_base 22: mod_base = OTHER; note = 2'-deoxy-2'-fluoroguanosine-3'-phosphorothioate
  modified_base 23: mod_base = OTHER; note = 2'-O-methyladenosine
atttcactttttgttgaagtaga

SEQ ID NO: 1079 - RNA, 23 nt, synthetic construct
  source 1..23: mol_type = other RNA
  modified_base 1: mod_base = OTHER; note = 2'-O-methyladenosine-3'-phosphate
  modified_base 2: mod_base = OTHER; note = 2'-deoxy-2'-fluorouridine-3'-phosphate
  modified_base 3: mod_base = OTHER; note = 2'-O-methyluridine-3'-phosphate
  modified_base 4: mod_base = OTHER; note = 2'-deoxy-2'-fluoroadenosine-3'-phosphate
  modified_base 5: mod_base = OTHER; note = 2'-O-methyladenosine-3'-phosphate
  modified_base 6: mod_base = OTHER; note = 2'-deoxy-2'-fluoroguanosine-3'-phosphate
  modified_base 7: mod_base = OTHER; note = 2'-O-methyluridine-3'-phosphate
  modified_base 8: mod_base = OTHER; note = 2'-deoxy-2'-fluorouridine-3'-phosphate
  modified_base 9: mod_base = OTHER; note = 2'-O-methyladenosine-3'-phosphate
  modified_base 10: mod_base = OTHER; note = 2'-deoxy-2'-fluoroguanosine-3'-phosphate
  modified_base 11: mod_base = OTHER; note = 2'-O-methyluridine-3'-phosphate
  modified_base 12: mod_base = OTHER; note = 2'-O-methyluridine-3'-phosphate
  modified_base 13: mod_base = OTHER; note = 2'-O-methyladenosine-3'-phosphate
  modified_base 14: mod_base = OTHER; note = 2'-deoxy-2'-fluoroguanosine-3'-phosphate
  modified_base 15: mod_base = OTHER; note = 2'-O-methyluridine-3'-phosphate
  modified_base 16: mod_base = OTHER; note = 2'-deoxy-2'-fluorouridine-3'-phosphate
  modified_base 17: mod_base = OTHER; note = 2'-O-methylguanosine-3'-phosphate
  modified_base 18: mod_base = OTHER; note = 2'-deoxy-2'-fluorocytidine-3'-phosphate
  modified_base 19: mod_base = OTHER; note = 2'-O-methyluridine-3'-phosphate
  modified_base 20: mod_base = OTHER; note = 2'-deoxy-2'-fluorocytidine-3'-phosphate
  modified_base 21: mod_base = OTHER; note = 2'-O-methyluridine-3'-phosphorothioate
  modified_base 22: mod_base = OTHER; note = 2'-deoxy-2'-fluorouridine-3'-phosphorothioate
  modified_base 23: mod_base = OTHER; note = 2'-O-methylcytidine
attaagttagttagttgctcttc

SEQ ID NO: 1080 - RNA, 23 nt, synthetic construct
  source 1..23: mol_type = other RNA
  modified_base 1: mod_base = OTHER; note = 2'-O-methyladenosine-3'-phosphate
  modified_base 2: mod_base = OTHER; note = 2'-deoxy-2'-fluoroadenosine-3'-phosphate
  modified_base 3: mod_base = OTHER; note = 2'-O-methylguanosine-3'-phosphate
  modified_base 4: mod_base = OTHER; note = 2'-deoxy-2'-fluoroguanosine-3'-phosphate
  modified_base 5: mod_base = OTHER; note = 2'-O-methyluridine-3'-phosphate
  modified_base 6: mod_base = OTHER; note = 2'-deoxy-2'-fluorocytidine-3'-phosphate
  modified_base 7: mod_base = OTHER; note = 2'-O-methyluridine-3'-phosphate
  modified_base 8: mod_base = OTHER; note = 2'-deoxy-2'-fluorouridine-3'-phosphate
  modified_base 9: mod_base = OTHER; note = 2'-O-methyluridine-3'-phosphate
  modified_base 10: mod_base = OTHER; note = 2'-deoxy-2'-fluoroguanosine-3'-phosphate
  modified_base 11: mod_base = OTHER; note = 2'-O-methyladenosine-3'-phosphate
  modified_base 12: mod_base = OTHER; note = 2'-O-methyluridine-3'-phosphate
  modified_base 13: mod_base = OTHER; note = 2'-O-methylguanosine-3'-phosphate
  modified_base 14: mod_base = OTHER; note = 2'-deoxy-2'-fluorocytidine-3'-phosphate
  modified_base 15: mod_base = OTHER; note = 2'-O-methyluridine-3'-phosphate
  modified_base 16: mod_base = OTHER; note = 2'-deoxy-2'-fluoroadenosine-3'-phosphate
  modified_base 17: mod_base = OTHER; note = 2'-O-methyluridine-3'-phosphate
  modified_base 18: mod_base = OTHER; note = 2'-deoxy-2'-fluorouridine-3'-phosphate
  modified_base 19: mod_base = OTHER; note = 2'-O-methyladenosine-3'-phosphate
  modified_base 20: mod_base = OTHER; note = 2'-deoxy-2'-fluorouridine-3'-phosphate
  modified_base 21: mod_base = OTHER; note = 2'-O-methylcytidine-3'-phosphorothioate
  modified_base 22: mod_base = OTHER; note = 2'-deoxy-2'-fluorouridine-3'-phosphorothioate
  modified_base 23: mod_base = OTHER; note = 2'-O-methyluridine
aaggtctttgatgctattatctt

SEQ ID NO: 1081 - RNA, 23 nt, synthetic construct
  source 1..23: mol_type = other RNA
  modified_base 1: mod_base = OTHER; note = 2'-O-methyluridine-3'-phosphate
  modified_base 2: mod_base = OTHER; note = 2'-deoxy-2'-fluoroadenosine-3'-phosphate
  modified_base 3: mod_base = OTHER; note = 2'-O-methyluridine-3'-phosphate
  modified_base 4: mod_base = OTHER; note = 2'-deoxy-2'-fluorouridine-3'-phosphate
  modified_base 5: mod_base = OTHER; note = 2'-O-methyluridine-3'-phosphate
  modified_base 6: mod_base = OTHER; note = 2'-deoxy-2'-fluorocytidine-3'-phosphate
  modified_base 7: mod_base = OTHER; note = 2'-O-methyluridine-3'-phosphate
  modified_base 8: mod_base = OTHER; note = 2'-deoxy-2'-fluorouridine-3'-phosphate
  modified_base 9: mod_base = OTHER; note = 2'-O-methyluridine-3'-phosphate
  modified_base 10: mod_base = OTHER; note = 2'-deoxy-2'-fluorouridine-3'-phosphate
  modified_base 11: mod_base = OTHER; note = 2'-O-methyladenosine-3'-phosphate
  modified_base 12: mod_base = OTHER; note = 2'-O-methyluridine-3'-phosphate
  modified_base 13: mod_base = OTHER; note = 2'-O-methyluridine-3'-phosphate
  modified_base 14: mod_base = OTHER; note = 2'-deoxy-2'-fluorouridine-3'-phosphate
  modified_base 15: mod_base = OTHER; note = 2'-O-methylguanosine-3'-phosphate
  modified_base 16: mod_base = OTHER; note = 2'-deoxy-2'-fluoroadenosine-3'-phosphate
  modified_base 17: mod_base = OTHER; note = 2'-O-methylcytidine-3'-phosphate
  modified_base 18: mod_base = OTHER; note = 2'-deoxy-2'-fluorouridine-3'-phosphate
  modified_base 19: mod_base = OTHER; note = 2'-O-methyladenosine-3'-phosphate
  modified_base 20: mod_base = OTHER; note = 2'-deoxy-2'-fluorouridine-3'-phosphate
  modified_base 21: mod_base = OTHER; note = 2'-O-methylguanosine-3'-phosphorothioate
  modified_base 22: mod_base = OTHER; note = 2'-deoxy-2'-fluorocytidine-3'-phosphorothioate
  modified_base 23: mod_base = OTHER; note = 2'-O-methyluridine
tatttcttttatttgactatgct

SEQ ID NO: 1082 - RNA, 23 nt, synthetic construct
  source 1..23: mol_type = other RNA
  modified_base 1: mod_base = OTHER; note = 2'-O-methyladenosine-3'-phosphate
  modified_base 2: mod_base = OTHER; note = 2'-deoxy-2'-fluorouridine-3'-phosphate
  modified_base 3: mod_base = OTHER; note = 2'-O-methyluridine-3'-phosphate
  modified_base 4: mod_base = OTHER; note = 2'-deoxy-2'-fluorouridine-3'-phosphate
  modified_base 5: mod_base = OTHER; note = 2'-O-methyluridine-3'-phosphate
  modified_base 6: mod_base = OTHER; note = 2'-deoxy-2'-fluorouridine-3'-phosphate
  modified_base 7: mod_base = OTHER; note = 2'-O-methylguanosine-3'-phosphate
  modified_base 8: mod_base = OTHER; note = 2'-deoxy-2'-fluoroadenosine-3'-phosphate
  modified_base 9: mod_base = OTHER; note = 2'-O-methylcytidine-3'-phosphate
  modified_base 10: mod_base = OTHER; note = 2'-deoxy-2'-fluorouridine-3'-phosphate
  modified_base 11: mod_base = OTHER; note = 2'-O-methyluridine-3'-phosphate
  modified_base 12: mod_base = OTHER; note = 2'-O-methylguanosine-3'-phosphate
  modified_base 13: mod_base = OTHER; note = 2'-O-methyluridine-3'-phosphate
  modified_base 14: mod_base = OTHER; note = 2'-deoxy-2'-fluoroadenosine-3'-phosphate
  modified_base 15: mod_base = OTHER; note = 2'-O-methylguanosine-3'-phosphate
  modified_base 16: mod_base = OTHER; note = 2'-deoxy-2'-fluorouridine-3'-phosphate
  modified_base 17: mod_base = OTHER; note = 2'-O-methyluridine-3'-phosphate
  modified_base 18: mod_base = OTHER; note = 2'-deoxy-2'-fluorouridine-3'-phosphate
  modified_base 19: mod_base = OTHER; note = 2'-O-methyladenosine-3'-phosphate
  modified_base 20: mod_base = OTHER; note = 2'-deoxy-2'-fluorouridine-3'-phosphate
  modified_base 21: mod_base = OTHER; note = 2'-O-methyladenosine-3'-phosphorothioate
  modified_base 22: mod_base = OTHER; note = 2'-deoxy-2'-fluorouridine-3'-phosphorothioate
  modified_base 23: mod_base = OTHER; note = 2'-O-methylguanosine
atttttgacttgtagtttatatg

SEQ ID NO: 1083 - RNA, 23 nt, synthetic construct
  source 1..23: mol_type = other RNA
  modified_base 1: mod_base = OTHER; note = 2'-O-methyluridine-3'-phosphate
  modified_base 2: mod_base = OTHER; note = 2'-deoxy-2'-fluorouridine-3'-phosphate
  modified_base 3: mod_base = OTHER; note = 2'-O-methyluridine-3'-phosphate
  modified_base 4: mod_base = OTHER; note = 2'-deoxy-2'-fluorocytidine-3'-phosphate
  modified_base 5: mod_base = OTHER; note = 2'-O-methyladenosine-3'-phosphate
  modified_base 6: mod_base = OTHER; note = 2'-deoxy-2'-fluoroadenosine-3'-phosphate
  modified_base 7: mod_base = OTHER; note = 2'-O-methylguanosine-3'-phosphate
  modified_base 8: mod_base = OTHER; note = 2'-deoxy-2'-fluorouridine-3'-phosphate
  modified_base 9: mod_base = OTHER; note = 2'-O-methyluridine-3'-phosphate
  modified_base 10: mod_base = OTHER; note = 2'-deoxy-2'-fluorouridine-3'-phosphate
  modified_base 11: mod_base = OTHER; note = 2'-O-methyluridine-3'-phosphate
  modified_base 12: mod_base = OTHER; note = 2'-O-methylguanosine-3'-phosphate
  modified_base 13: mod_base = OTHER; note = 2'-O-methyladenosine-3'-phosphate
  modified_base 14: mod_base = OTHER; note = 2'-deoxy-2'-fluoroguanosine-3'-phosphate
  modified_base 15: mod_base = OTHER; note = 2'-O-methyluridine-3'-phosphate
  modified_base 16: mod_base = OTHER; note = 2'-deoxy-2'-fluorouridine-3'-phosphate
  modified_base 17: mod_base = OTHER; note = 2'-O-methylguanosine-3'-phosphate
  modified_base 18: mod_base = OTHER; note = 2'-deoxy-2'-fluoroadenosine-3'-phosphate
  modified_base 19: mod_base = OTHER; note = 2'-O-methylguanosine-3'-phosphate
  modified_base 20: mod_base = OTHER; note = 2'-deoxy-2'-fluorouridine-3'-phosphate
  modified_base 21: mod_base = OTHER; note = 2'-O-methyluridine-3'-phosphorothioate
  modified_base 22: mod_base = OTHER; note = 2'-deoxy-2'-fluorocytidine-3'-phosphorothioate
  modified_base 23: mod_base = OTHER; note = 2'-O-methyladenosine
tttcaagttttgagttgagttca

SEQ ID NO: 1084 - RNA, 23 nt, synthetic construct
  source 1..23: mol_type = other RNA
  modified_base 1: mod_base = OTHER; note = 2'-O-methyluridine-3'-phosphate
  modified_base 2: mod_base = OTHER; note = 2'-deoxy-2'-fluoroadenosine-3'-phosphate
  modified_base 3: mod_base = OTHER; note = 2'-O-methyluridine-3'-phosphate
  modified_base 4: mod_base = OTHER; note = 2'-deoxy-2'-fluorouridine-3'-phosphate
  modified_base 5: mod_base = OTHER; note = 2'-O-methyluridine-3'-phosphate
  modified_base 6: mod_base = OTHER; note = 2'-deoxy-2'-fluorocytidine-3'-phosphate
  modified_base 7: mod_base = OTHER; note = 2'-O-methyladenosine-3'-phosphate
  modified_base 8: mod_base = OTHER; note = 2'-deoxy-2'-fluorocytidine-3'-phosphate
  modified_base 9: mod_base = OTHER; note = 2'-O-methyluridine-3'-phosphate
  modified_base 10: mod_base = OTHER; note = 2'-deoxy-2'-fluorouridine-3'-phosphate
  modified_base 11: mod_base = OTHER; note = 2'-O-methyluridine-3'-phosphate
  modified_base 12: mod_base = OTHER; note = 2'-O-methyluridine-3'-phosphate
  modified_base 13: mod_base = OTHER; note = 2'-O-methyluridine-3'-phosphate
  modified_base 14: mod_base = OTHER; note = 2'-deoxy-2'-fluoroguanosine-3'-phosphate
  modified_base 15: mod_base = OTHER; note = 2'-O-methyluridine-3'-phosphate
  modified_base 16: mod_base = OTHER; note = 2'-deoxy-2'-fluorouridine-3'-phosphate
  modified_base 17: mod_base = OTHER; note = 2'-O-methylguanosine-3'-phosphate
  modified_base 18: mod_base = OTHER; note = 2'-deoxy-2'-fluoroadenosine-3'-phosphate
  modified_base 19: mod_base = OTHER; note = 2'-O-methyladenosine-3'-phosphate
  modified_base 20: mod_base = OTHER; note = 2'-deoxy-2'-fluoroguanosine-3'-phosphate
  modified_base 21: mod_base = OTHER; note = 2'-O-methyluridine-3'-phosphorothioate
  modified_base 22: mod_base = OTHER; note = 2'-deoxy-2'-fluoroadenosine-3'-phosphorothioate
  modified_base 23: mod_base = OTHER; note = 2'-O-methylguanosine
tatttcactttttgttgaagtag

SEQ ID NO: 1085 - RNA, 23 nt, synthetic construct
  source 1..23: mol_type = other RNA
  modified_base 1: mod_base = OTHER; note = 2'-O-methyladenosine-3'-phosphate
  modified_base 2: mod_base = OTHER; note = 2'-deoxy-2'-fluoroadenosine-3'-phosphate
  modified_base 3: mod_base = OTHER; note = 2'-O-methyluridine-3'-phosphate
  modified_base 4: mod_base = OTHER; note = 2'-deoxy-2'-fluorouridine-3'-phosphate
  modified_base 5: mod_base = OTHER; note = 2'-O-methyladenosine-3'-phosphate
  modified_base 6: mod_base = OTHER; note = 2'-deoxy-2'-fluoroadenosine-3'-phosphate
  modified_base 7: mod_base = OTHER; note = 2'-O-methylguanosine-3'-phosphate
  modified_base 8: mod_base = OTHER; note = 2'-deoxy-2'-fluorouridine-3'-phosphate
  modified_base 9: mod_base = OTHER; note = 2'-O-methyluridine-3'-phosphate
  modified_base 10: mod_base = OTHER; note = 2'-deoxy-2'-fluoroadenosine-3'-phosphate
  modified_base 11: mod_base = OTHER; note = 2'-O-methylguanosine-3'-phosphate
  modified_base 12: mod_base = OTHER; note = 2'-O-methyluridine-3'-phosphate
  modified_base 13: mod_base = OTHER; note = 2'-O-methyluridine-3'-phosphate
  modified_base 14: mod_base = OTHER; note = 2'-deoxy-2'-fluoroadenosine-3'-phosphate
  modified_base 15: mod_base = OTHER; note = 2'-O-methylguanosine-3'-phosphate
  modified_base 16: mod_base = OTHER; note = 2'-deoxy-2'-fluorouridine-3'-phosphate
  modified_base 17: mod_base = OTHER; note = 2'-O-methyluridine-3'-phosphate
  modified_base 18: mod_base = OTHER; note = 2'-deoxy-2'-fluoroguanosine-3'-phosphate
  modified_base 19: mod_base = OTHER; note = 2'-O-methylcytidine-3'-phosphate
  modified_base 20: mod_base = OTHER; note = 2'-deoxy-2'-fluorouridine-3'-phosphate
  modified_base 21: mod_base = OTHER; note = 2'-O-methylcytidine-3'-phosphorothioate
  modified_base 22: mod_base = OTHER; note = 2'-deoxy-2'-fluorouridine-3'-phosphorothioate
  modified_base 23: mod_base = OTHER; note = 2'-O-methyluridine
aattaagttagttagttgctctt

SEQ ID NO: 1086 - RNA, 23 nt, synthetic construct
  source 1..23: mol_type = other RNA
  modified_base 1: mod_base = OTHER; note = 2'-O-methyluridine-3'-phosphate
  modified_base 2: mod_base = OTHER; note = 2'-deoxy-2'-fluoroadenosine-3'-phosphate
  modified_base 3: mod_base = OTHER; note = 2'-O-methyluridine-3'-phosphate
  modified_base 4: mod_base = OTHER; note = 2'-deoxy-2'-fluorouridine-3'-phosphate
  modified_base 5: mod_base = OTHER; note = 2'-O-methyluridine-3'-phosphate
  modified_base 6: mod_base = OTHER; note = 2'-deoxy-2'-fluoroguanosine-3'-phosphate
  modified_base 7: mod_base = OTHER; note = 2'-O-methyladenosine-3'-phosphate
  modified_base 8: mod_base = OTHER; note = 2'-deoxy-2'-fluorocytidine-3'-phosphate
  modified_base 9: mod_base = OTHER; note = 2'-O-methyluridine-3'-phosphate
  modified_base 10: mod_base = OTHER; note = 2'-deoxy-2'-fluoroadenosine-3'-phosphate
  modified_base 11: mod_base = OTHER; note = 2'-O-methyluridine-3'-phosphate
  modified_base 12: mod_base = OTHER; note = 2'-O-methylguanosine-3'-phosphate
  modified_base 13: mod_base = OTHER; note = 2'-O-methylcytidine-3'-phosphate
  modified_base 14: mod_base = OTHER; note = 2'-deoxy-2'-fluorouridine-3'-phosphate
  modified_base 15: mod_base = OTHER; note = 2'-O-methylguanosine-3'-phosphate
  modified_base 16: mod_base = OTHER; note = 2'-deoxy-2'-fluorouridine-3'-phosphate
  modified_base 17: mod_base = OTHER; note = 2'-O-methyluridine-3'-phosphate
  modified_base 18: mod_base = OTHER; note = 2'-deoxy-2'-fluoroguanosine-3'-phosphate
  modified_base 19: mod_base = OTHER; note = 2'-O-methylguanosine-3'-phosphate
  modified_base 20: mod_base = OTHER; note = 2'-deoxy-2'-fluorouridine-3'-phosphate
  modified_base 21: mod_base = OTHER; note = 2'-O-methyluridine-3'-phosphorothioate
  modified_base 22: mod_base = OTHER; note = 2'-deoxy-2'-fluorouridine-3'-phosphorothioate
  modified_base 23: mod_base = OTHER; note = 2'-O-methyladenosine
tatttgactatgctgttggttta

SEQ ID NO: 1087 - RNA, 23 nt, synthetic construct
  source 1..23: mol_type = other RNA
  modified_base 1: mod_base = OTHER; note = 2'-O-methyluridine-3'-phosphate
  modified_base 2: mod_base = OTHER; note = 2'-deoxy-2'-fluorouridine-3'-phosphate
  modified_base 3: mod_base = OTHER; note = 2'-O-methylcytidine-3'-phosphate
  modified_base 4: mod_base = OTHER; note = 2'-deoxy-2'-fluorouridine-3'-phosphate
  modified_base 5: mod_base = OTHER; note = 2'-O-methyladenosine-3'-phosphate
  modified_base 6: mod_base = OTHER; note = 2'-deoxy-2'-fluorouridine-3'-phosphate
  modified_base 7: mod_base = OTHER; note = 2'-O-methyluridine-3'-phosphate
  modified_base 8: mod_base = OTHER; note = 2'-deoxy-2'-fluorouridine-3'-phosphate
  modified_base 9: mod_base = OTHER; note = 2'-O-methylcytidine-3'-phosphate
  modified_base 10: mod_base = OTHER; note = 2'-deoxy-2'-fluorouridine-3'-phosphate
  modified_base 11: mod_base = OTHER; note = 2'-O-methyluridine-3'-phosphate
  modified_base 12: mod_base = OTHER; note = 2'-O-methyluridine-3'-phosphate
  modified_base 13: mod_base = OTHER; note = 2'-O-methyluridine-3'-phosphate
  modified_base 14: mod_base = OTHER; note = 2'-deoxy-2'-fluoroadenosine-3'-phosphate
  modified_base 15: mod_base = OTHER; note = 2'-O-methyluridine-3'-phosphate
  modified_base 16: mod_base = OTHER; note = 2'-deoxy-2'-fluorouridine-3'-phosphate
  modified_base 17: mod_base = OTHER; note = 2'-O-methyluridine-3'-phosphate
  modified_base 18: mod_base = OTHER; note = 2'-deoxy-2'-fluoroguanosine-3'-phosphate
  modified_base 19: mod_base = OTHER; note = 2'-O-methyladenosine-3'-phosphate
  modified_base 20: mod_base = OTHER; note = 2'-deoxy-2'-fluorocytidine-3'-phosphate
  modified_base 21: mod_base = OTHER; note = 2'-O-methyluridine-3'-phosphorothioate
  modified_base 22: mod_base = OTHER; note = 2'-deoxy-2'-fluoroadenosine-3'-phosphorothioate
  modified_base 23: mod_base = OTHER; note = 2'-O-methyluridine
ttctatttcttttatttgactat

SEQ ID NO: 1088 - RNA, 23 nt, synthetic construct
  source 1..23: mol_type = other RNA
  modified_base 1: mod_base = OTHER; note = 2'-O-methyluridine-3'-phosphate
  modified_base 2: mod_base = OTHER; note = 2'-deoxy-2'-fluorouridine-3'-phosphate
  modified_base 3: mod_base = OTHER; note = 2'-O-methyluridine-3'-phosphate
  modified_base 4: mod_base = OTHER; note = 2'-deoxy-2'-fluoroadenosine-3'-phosphate
  modified_base 5: mod_base = OTHER; note = 2'-O-methylcytidine-3'-phosphate
  modified_base 6: mod_base = OTHER; note = 2'-deoxy-2'-fluorocytidine-3'-phosphate
  modified_base 7: mod_base = OTHER; note = 2'-O-methyluridine-3'-phosphate
  modified_base 8: mod_base = OTHER; note = 2'-deoxy-2'-fluorocytidine-3'-phosphate
  modified_base 9: mod_base = OTHER; note = 2'-O-methyluridine-3'-phosphate
  modified_base 10: mod_base = OTHER; note = 2'-deoxy-2'-fluorouridine-3'-phosphate
  modified_base 11: mod_base = OTHER; note = 2'-O-methylcytidine-3'-phosphate
  modified_base 12: mod_base = OTHER; note = 2'-O-methyladenosine-3'-phosphate
  modified_base 13: mod_base = OTHER; note = 2'-O-methyluridine-3'-phosphate
  modified_base 14: mod_base = OTHER; note = 2'-deoxy-2'-fluorouridine-3'-phosphate
  modified_base 15: mod_base = OTHER; note = 2'-O-methyluridine-3'-phosphate
  modified_base 16: mod_base = OTHER; note = 2'-deoxy-2'-fluorouridine-3'-phosphate
  modified_base 17: mod_base = OTHER; note = 2'-O-methyluridine-3'-phosphate
  modified_base 18: mod_base = OTHER; note = 2'-deoxy-2'-fluoroguanosine-3'-phosphate
  modified_base 19: mod_base = OTHER; note = 2'-O-methyladenosine-3'-phosphate
  modified_base 20: mod_base = OTHER; note = 2'-deoxy-2'-fluorocytidine-3'-phosphate
  modified_base 21: mod_base = OTHER; note = 2'-O-methyluridine-3'-phosphorothioate
  modified_base 22: mod_base = OTHER; note = 2'-deoxy-2'-fluorouridine-3'-phosphorothioate
  modified_base 23: mod_base = OTHER; note = 2'-O-methylguanosine
tttacctcttcatttttgacttg

SEQ ID NO: 1089 - RNA, 23 nt, synthetic construct
  source 1..23: mol_type = other RNA
  modified_base 1: mod_base = OTHER; note = 2'-O-methyluridine-3'-phosphate
  modified_base 2: mod_base = OTHER; note = 2'-deoxy-2'-fluorouridine-3'-phosphate
  modified_base 3: mod_base = OTHER; note = 2'-O-methylcytidine-3'-phosphate
  modified_base 4: mod_base = OTHER; note = 2'-deoxy-2'-fluorouridine-3'-phosphate
  modified_base 5: mod_base = OTHER; note = 2'-O-methyluridine-3'-phosphate
  modified_base 6: mod_base = OTHER; note = 2'-deoxy-2'-fluorocytidine-3'-phosphate
  modified_base 7: mod_base = OTHER; note = 2'-O-methyluridine-3'-phosphate
  modified_base 8: mod_base = OTHER; note = 2'-deoxy-2'-fluoroadenosine-3'-phosphate
  modified_base 9: mod_base = OTHER; note = 2'-O-methylguanosine-3'-phosphate
  modified_base 10: mod_base = OTHER; note = 2'-deoxy-2'-fluoroguanosine-3'-phosphate
  modified_base 11: mod_base = OTHER; note = 2'-O-methyladenosine-3'-phosphate
  modified_base 12: mod_base = OTHER; note = 2'-O-methylguanosine-3'-phosphate
  modified_base 13: mod_base = OTHER; note = 2'-O-methylguanosine-3'-phosphate
  modified_base 14: mod_base = OTHER; note = 2'-deoxy-2'-fluorocytidine-3'-phosphate
  modified_base 15: mod_base = OTHER; note = 2'-O-methyluridine-3'-phosphate
  modified_base 16: mod_base = OTHER; note = 2'-deoxy-2'-fluorouridine-3'-phosphate
  modified_base 17: mod_base = OTHER; note = 2'-O-methyluridine-3'-phosphate
  modified_base 18: mod_base = OTHER; note = 2'-deoxy-2'-fluorocytidine-3'-phosphate
  modified_base 19: mod_base = OTHER; note = 2'-O-methyladenosine-3'-phosphate
  modified_base 20: mod_base = OTHER; note = 2'-deoxy-2'-fluoroadenosine-3'-phosphate
  modified_base 21: mod_base = OTHER; note = 2'-O-methylguanosine-3'-phosphorothioate
  modified_base 22: mod_base = OTHER; note = 2'-deoxy-2'-fluorouridine-3'-phosphorothioate
  modified_base 23: mod_base = OTHER; note = 2'-O-methyluridine
ttcttctaggaggctttcaagtt

SEQ ID NO: 1090 - RNA, 23 nt, synthetic construct
  source 1..23: mol_type = other RNA
  modified_base 1: mod_base = OTHER; note = 2'-O-methyladenosine-3'-phosphate
  modified_base 2: mod_base = OTHER; note = 2'-deoxy-2'-fluorouridine-3'-phosphate
  modified_base 3: mod_base = OTHER; note = 2'-O-methyladenosine-3'-phosphate
  modified_base 4: mod_base = OTHER; note = 2'-deoxy-2'-fluorouridine-3'-phosphate
  modified_base 5: mod_base = OTHER; note = 2'-O-methyluridine-3'-phosphate
  modified_base 6: mod_base = OTHER; note = 2'-deoxy-2'-fluorouridine-3'-phosphate
  modified_base 7: mod_base = OTHER; note = 2'-O-methylcytidine-3'-phosphate
  modified_base 8: mod_base = OTHER; note = 2'-deoxy-2'-fluoroadenosine-3'-phosphate
  modified_base 9: mod_base = OTHER; note = 2'-O-methylcytidine-3'-phosphate
  modified_base 10: mod_base = OTHER; note = 2'-deoxy-2'-fluorouridine-3'-phosphate
  modified_base 11: mod_base = OTHER; note = 2'-O-methyluridine-3'-phosphate
  modified_base 12: mod_base = OTHER; note = 2'-O-methyluridine-3'-phosphate
  modified_base 13: mod_base = OTHER; note = 2'-O-methyluridine-3'-phosphate
  modified_base 14: mod_base = OTHER; note = 2'-deoxy-2'-fluorouridine-3'-phosphate
  modified_base 15: mod_base = OTHER; note = 2'-O-methylguanosine-3'-phosphate
  modified_base 16: mod_base = OTHER; note = 2'-deoxy-2'-fluorouridine-3'-phosphate
  modified_base 17: mod_base = OTHER; note = 2'-O-methyluridine-3'-phosphate
  modified_base 18: mod_base = OTHER; note = 2'-deoxy-2'-fluoroguanosine-3'-phosphate
  modified_base 19: mod_base = OTHER; note = 2'-O-methyladenosine-3'-phosphate
  modified_base 20: mod_base = OTHER; note = 2'-deoxy-2'-fluoroadenosine-3'-phosphate
  modified_base 21: mod_base = OTHER; note = 2'-O-methylguanosine-3'-phosphorothioate
  modified_base 22: mod_base = OTHER; note = 2'-deoxy-2'-fluorouridine-3'-phosphorothioate
  modified_base 23: mod_base = OTHER; note = 2'-O-methyladenosine
atatttcactttttgttgaagta

SEQ ID NO: 1091 - RNA, 23 nt, synthetic construct
  source 1..23: mol_type = other RNA
  modified_base 1: mod_base = OTHER; note = 2'-O-methyluridine-3'-phosphate
  modified_base 2: mod_base = OTHER; note = 2'-deoxy-2'-fluorouridine-3'-phosphate
  modified_base 3: mod_base = OTHER; note = 2'-O-methylguanosine-3'-phosphate
  modified_base 4: mod_base = OTHER; note = 2'-deoxy-2'-fluoroadenosine-3'-phosphate
  modified_base 5: mod_base = OTHER; note = 2'-O-methyladenosine-3'-phosphate
  modified_base 6: mod_base = OTHER; note = 2'-deoxy-2'-fluorouridine-3'-phosphate
  modified_base 7: mod_base = OTHER; note = 2'-O-methyluridine-3'-phosphate
  modified_base 8: mod_base = OTHER; note = 2'-deoxy-2'-fluoroadenosine-3'-phosphate
  modified_base 9: mod_base = OTHER; note = 2'-O-methyladenosine-3'-phosphate
  modified_base 10: mod_base = OTHER; note = 2'-deoxy-2'-fluoroguanosine-3'-phosphate
  modified_base 11: mod_base = OTHER; note = 2'-O-methyluridine-3'-phosphate
  modified_base 12: mod_base = OTHER; note = 2'-O-methyluridine-3'-phosphate
  modified_base 13: mod_base = OTHER; note = 2'-O-methyladenosine-3'-phosphate
  modified_base 14: mod_base = OTHER; note = 2'-deoxy-2'-fluoroguanosine-3'-phosphate
  modified_base 15: mod_base = OTHER; note = 2'-O-methyluridine-3'-phosphate
  modified_base 16: mod_base = OTHER; note = 2'-deoxy-2'-fluorouridine-3'-phosphate
  modified_base 17: mod_base = OTHER; note = 2'-O-methyladenosine-3'-phosphate
  modified_base 18: mod_base = OTHER; note = 2'-deoxy-2'-fluoroguanosine-3'-phosphate
  modified_base 19: mod_base = OTHER; note = 2'-O-methyluridine-3'-phosphate
  modified_base 20: mod_base = OTHER; note = 2'-deoxy-2'-fluorouridine-3'-phosphate
  modified_base 21: mod_base = OTHER; note = 2'-O-methylguanosine-3'-phosphorothioate
  modified_base 22: mod_base = OTHER; note = 2'-deoxy-2'-fluorocytidine-3'-phosphorothioate
  modified_base 23: mod_base = OTHER; note = 2'-O-methyluridine
ttgaattaagttagttagttgct

SEQ ID NO: 1092 - RNA, 23 nt, synthetic construct
  source 1..23: mol_type = other RNA
  modified_base 1: mod_base = OTHER; note = 2'-O-methyluridine-3'-phosphate
  modified_base 2: mod_base = OTHER; note = 2'-deoxy-2'-fluorouridine-3'-phosphate
  modified_base 3: mod_base = OTHER; note = 2'-O-methyladenosine-3'-phosphate
  modified_base 4: mod_base = OTHER; note = 2'-deoxy-2'-fluorouridine-3'-phosphate
  modified_base 5: mod_base = OTHER; note = 2'-O-methyluridine-3'-phosphate
  modified_base 6: mod_base = OTHER; note = 2'-deoxy-2'-fluorouridine-3'-phosphate
  modified_base 7: mod_base = OTHER; note = 2'-O-methylguanosine-3'-phosphate
  modified_base 8: mod_base = OTHER; note = 2'-deoxy-2'-fluoroadenosine-3'-phosphate
  modified_base 9: mod_base = OTHER; note = 2'-O-methylcytidine-3'-phosphate
  modified_base 10: mod_base = OTHER; note = 2'-deoxy-2'-fluorouridine-3'-phosphate
  modified_base 11: mod_base = OTHER; note = 2'-O-methyladenosine-3'-phosphate
  modified_base 12: mod_base = OTHER; note = 2'-O-methyluridine-3'-phosphate
  modified_base 13: mod_base = OTHER; note = 2'-O-methylguanosine-3'-phosphate
  modified_base 14: mod_base = OTHER; note = 2'-deoxy-2'-fluorocytidine-3'-phosphate
  modified_base 15: mod_base = OTHER; note = 2'-O-methyluridine-3'-phosphate
  modified_base 16: mod_base = OTHER; note = 2'-deoxy-2'-fluoroguanosine-3'-phosphate
  modified_base 17: mod_base = OTHER; note = 2'-O-methyluridine-3'-phosphate
  modified_base 18: mod_base = OTHER; note = 2'-deoxy-2'-fluorouridine-3'-phosphate
  modified_base 19: mod_base = OTHER; note = 2'-O-methylguanosine-3'-phosphate
  modified_base 20: mod_base = OTHER; note = 2'-deoxy-2'-fluoroguanosine-3'-phosphate
  modified_base 21: mod_base = OTHER; note = 2'-O-methyluridine-3'-phosphorothioate
  modified_base 22: mod_base = OTHER; note = 2'-deoxy-2'-fluorouridine-3'-phosphorothioate
  modified_base 23: mod_base = OTHER; note = 2'-O-methyluridine
ttatttgactatgctgttggttt

SEQ ID NO: 1093 - RNA, 23 nt, synthetic construct
  source 1..23: mol_type = other RNA
  modified_base 1: mod_base = OTHER; note = 2'-O-methyluridine-3'-phosphate
  modified_base 2: mod_base = OTHER; note = 2'-deoxy-2'-fluoroadenosine-3'-phosphate
  modified_base 3: mod_base = OTHER; note = 2'-O-methylguanosine-3'-phosphate
  modified_base 4: mod_base = OTHER; note = 2'-deoxy-2'-fluoroadenosine-3'-phosphate
  modified_base 5: mod_base = OTHER; note = 2'-O-methylguanosine-3'-phosphate
  modified_base 6: mod_base = OTHER; note = 2'-deoxy-2'-fluoroadenosine-3'-phosphate
  modified_base 7: mod_base = OTHER; note = 2'-O-methyladenosine-3'-phosphate
  modified_base 8: mod_base = OTHER; note = 2'-deoxy-2'-fluoroadenosine-3'-phosphate
  modified_base 9: mod_base = OTHER; note = 2'-O-methyluridine-3'-phosphate
  modified_base 10: mod_base = OTHER; note = 2'-deoxy-2'-fluorouridine-3'-phosphate
  modified_base 11: mod_base = OTHER; note = 2'-O-methyluridine-3'-phosphate
  modified_base 12: mod_base = OTHER; note = 2'-O-methylcytidine-3'-phosphate
  modified_base 13: mod_base = OTHER; note = 2'-O-methyluridine-3'-phosphate
  modified_base 14: mod_base = OTHER; note = 2'-deoxy-2'-fluoroguanosine-3'-phosphate
  modified_base 15: mod_base = OTHER; note = 2'-O-methyluridine-3'-phosphate
  modified_base 16: mod_base = OTHER; note = 2'-deoxy-2'-fluoroguanosine-3'-phosphate
  modified_base 17: mod_base = OTHER; note = 2'-O-methylguanosine-3'-phosphate
  modified_base 18: mod_base = OTHER; note = 2'-deoxy-2'-fluoroguanosine-3'-phosphate
  modified_base 19: mod_base = OTHER; note = 2'-O-methyluridine-3'-phosphate
  modified_base 20: mod_base = OTHER; note = 2'-deoxy-2'-fluorouridine-3'-phosphate
  modified_base 21: mod_base = OTHER; note = 2'-O-methylcytidine-3'-phosphorothioate
  modified_base 22: mod_base = OTHER; note = 2'-deoxy-2'-fluorouridine-3'-phosphorothioate
  modified_base 23: mod_base = OTHER; note = 2'-O-methyluridine
tagagaaatttctgtgggttctt

SEQ ID NO: 1094 - RNA, 23 nt, synthetic construct
  source 1..23: mol_type = other RNA
  modified_base 1: mod_base = OTHER; note = 2'-O-methyluridine-3'-phosphate
  modified_base 2: mod_base = OTHER; note = 2'-deoxy-2'-fluorouridine-3'-phosphate
  modified_base 3: mod_base = OTHER; note = 2'-O-methylguanosine-3'-phosphate
  modified_base 4: mod_base = OTHER; note = 2'-deoxy-2'-fluoroadenosine-3'-phosphate
  modified_base 5: mod_base = OTHER; note = 2'-O-methylguanosine-3'-phosphate
  modified_base 6: mod_base = OTHER; note = 2'-deoxy-2'-fluorouridine-3'-phosphate
  modified_base 7: mod_base = OTHER; note = 2'-O-methyluridine-3'-phosphate
  modified_base 8: mod_base = OTHER; note = 2'-deoxy-2'-fluorocytidine-3'-phosphate
  modified_base 9: mod_base = OTHER; note = 2'-O-methyladenosine-3'-phosphate
  modified_base 10: mod_base = OTHER; note = 2'-deoxy-2'-fluoroadenosine-3'-phosphate
  modified_base 11: mod_base = OTHER; note = 2'-O-methylguanosine-3'-phosphate
  modified_base 12: mod_base = OTHER; note = 2'-O-methyluridine-3'-phosphate
  modified_base 13: mod_base = OTHER; note = 2'-O-methylguanosine-3'-phosphate
  modified_base 14: mod_base = OTHER; note = 2'-deoxy-2'-fluoroadenosine-3'-phosphate
  modified_base 15: mod_base = OTHER; note = 2'-O-methylcytidine-3'-phosphate
  modified_base 16: mod_base = OTHER; note = 2'-deoxy-2'-fluoroadenosine-3'-phosphate
  modified_base 17: mod_base = OTHER; note = 2'-O-methyluridine-3'-phosphate
  modified_base 18: mod_base = OTHER; note = 2'-deoxy-2'-fluoroadenosine-3'-phosphate
  modified_base 19: mod_base = OTHER; note = 2'-O-methyluridine-3'-phosphate
  modified_base 20: mod_base = OTHER; note = 2'-deoxy-2'-fluorouridine-3'-phosphate
  modified_base 21: mod_base = OTHER; note = 2'-O-methylcytidine-3'-phosphorothioate
  modified_base 22: mod_base = OTHER; note = 2'-deoxy-2'-fluorouridine-3'-phosphorothioate
  modified_base 23: mod_base = OTHER; note = 2'-O-methyluridine
ttgagttcaagtgacatattctt

SEQ ID NO: 1095 - RNA, 23 nt, synthetic construct
  source 1..23: mol_type = other RNA
  modified_base 1: mod_base = OTHER; note = 2'-O-methyluridine-3'-phosphate
  modified_base 2: mod_base = OTHER; note = 2'-deoxy-2'-fluorouridine-3'-phosphate
  modified_base 3: mod_base = OTHER; note = 2'-O-methyluridine-3'-phosphate
  modified_base 4: mod_base = OTHER; note = 2'-deoxy-2'-fluorouridine-3'-phosphate
  modified_base 5: mod_base = OTHER; note = 2'-O-methylcytidine-3'-phosphate
  modified_base 6: mod_base = OTHER; note = 2'-deoxy-2'-fluorouridine-3'-phosphate
  modified_base 7: mod_base = OTHER; note = 2'-O-methyluridine-3'-phosphate
  modified_base 8: mod_base = OTHER; note = 2'-deoxy-2'-fluorocytidine-3'-phosphate
  modified_base 9: mod_base = OTHER; note = 2'-O-methyluridine-3'-phosphate
  modified_base 10: mod_base = OTHER; note = 2'-deoxy-2'-fluoroadenosine-3'-phosphate
  modified_base 11: mod_base = OTHER; note = 2'-O-methylguanosine-3'-phosphate
  modified_base 12: mod_base = OTHER; note = 2'-O-methylguanosine-3'-phosphate
  modified_base 13: mod_base = OTHER; note = 2'-O-methyladenosine-3'-phosphate
  modified_base 14: mod_base = OTHER; note = 2'-deoxy-2'-fluoroguanosine-3'-phosphate
  modified_base 15: mod_base = OTHER; note = 2'-O-methylguanosine-3'-phosphate
  modified_base 16: mod_base = OTHER; note = 2'-deoxy-2'-fluorocytidine-3'-phosphate
  modified_base 17: mod_base = OTHER; note = 2'-O-methyluridine-3'-phosphate
  modified_base 18: mod_base = OTHER; note = 2'-deoxy-2'-fluorouridine-3'-phosphate
  modified_base 19: mod_base = OTHER; note = 2'-O-methyluridine-3'-phosphate
  modified_base 20: mod_base = OTHER; note = 2'-deoxy-2'-fluorocytidine-3'-phosphate
  modified_base 21: mod_base = OTHER; note = 2'-O-methyladenosine-3'-phosphorothioate
  modified_base 22: mod_base = OTHER; note = 2'-deoxy-2'-fluoroadenosine-3'-phosphorothioate
  modified_base 23: mod_base = OTHER; note = 2'-O-methylguanosine
ttttcttctaggaggctttcaag

SEQ ID NO: 1096 - RNA, 23 nt, synthetic construct
  source 1..23: mol_type = other RNA
  modified_base 1: mod_base = OTHER; note = 2'-O-methyladenosine-3'-phosphate
  modified_base 2: mod_base = OTHER; note = 2'-deoxy-2'-fluoroadenosine-3'-phosphate
  modified_base 3: mod_base = OTHER; note = 2'-O-methyluridine-3'-phosphate
  modified_base 4: mod_base = OTHER; note = 2'-deoxy-2'-fluoroadenosine-3'-phosphate
  modified_base 5: mod_base = OTHER; note = 2'-O-methyluridine-3'-phosphate
  modified_base 6: mod_base = OTHER; note = 2'-deoxy-2'-fluorouridine-3'-phosphate
  modified_base 7: mod_base = OTHER; note = 2'-O-methyluridine-3'-phosphate
  modified_base 8: mod_base = OTHER; note = 2'-deoxy-2'-fluorocytidine-3'-phosphate
  modified_base 9: mod_base = OTHER; note = 2'-O-methyladenosine-3'-phosphate
  modified_base 10: mod_base = OTHER; note = 2'-deoxy-2'-fluorocytidine-3'-phosphate
  modified_base 11: mod_base = OTHER; note = 2'-O-methyluridine-3'-phosphate
  modified_base 12: mod_base = OTHER; note = 2'-O-methyluridine-3'-phosphate
  modified_base 13: mod_base = OTHER; note = 2'-O-methyluridine-3'-phosphate
  modified_base 14: mod_base = OTHER; note = 2'-deoxy-2'-fluorouridine-3'-phosphate
  modified_base 15: mod_base = OTHER; note = 2'-O-methyluridine-3'-phosphate
  modified_base 16: mod_base = OTHER; note = 2'-deoxy-2'-fluoroguanosine-3'-phosphate
  modified_base 17: mod_base = OTHER; note = 2'-O-methyluridine-3'-phosphate
  modified_base 18: mod_base = OTHER; note = 2'-deoxy-2'-fluorouridine-3'-phosphate
  modified_base 19: mod_base = OTHER; note = 2'-O-methylguanosine-3'-phosphate
  modified_base 20: mod_base = OTHER; note = 2'-deoxy-2'-fluoroadenosine-3'-phosphate
  modified_base 21: mod_base = OTHER; note = 2'-O-methyladenosine-3'-phosphorothioate
  modified_base 22: mod_base = OTHER; note = 2'-deoxy-2'-fluoroguanosine-3'-phosphorothioate
  modified_base 23: mod_base = OTHER; note = 2'-O-methyluridine
aatatttcactttttgttgaagt

SEQ ID NO: 1097 - RNA, 23 nt, synthetic construct
  source 1..23: mol_type = other RNA
  modified_base 1: mod_base = OTHER; note = 2'-O-methyluridine-3'-phosphate
  modified_base 2: mod_base = OTHER; note = 2'-deoxy-2'-fluorouridine-3'-phosphate
  modified_base 3: mod_base = OTHER; note = 2'-O-methyluridine-3'-phosphate
  modified_base 4: mod_base = OTHER; note = 2'-deoxy-2'-fluoroguanosine-3'-phosphate
  modified_base 5: mod_base = OTHER; note = 2'-O-methyladenosine-3'-phosphate
  modified_base 6: mod_base = OTHER; note = 2'-deoxy-2'-fluoroadenosine-3'-phosphate
  modified_base 7: mod_base = OTHER; note = 2'-O-methyluridine-3'-phosphate
  modified_base 8: mod_base = OTHER; note = 2'-deoxy-2'-fluorouridine-3'-phosphate
  modified_base 9: mod_base = OTHER; note = 2'-O-methyladenosine-3'-phosphate
  modified_base 10: mod_base = OTHER; note = 2'-deoxy-2'-fluoroadenosine-3'-phosphate
  modified_base 11: mod_base = OTHER; note = 2'-O-methylguanosine-3'-phosphate
  modified_base 12: mod_base = OTHER; note = 2'-O-methyluridine-3'-phosphate
  modified_base 13: mod_base = OTHER; note = 2'-O-methyluridine-3'-phosphate
  modified_base 14: mod_base = OTHER; note = 2'-deoxy-2'-fluoroadenosine-3'-phosphate
  modified_base 15: mod_base = OTHER; note = 2'-O-methylguanosine-3'-phosphate
  modified_base 16: mod_base = OTHER; note = 2'-deoxy-2'-fluorouridine-3'-phosphate
  modified_base 17: mod_base = OTHER; note = 2'-O-methyluridine-3'-phosphate
  modified_base 18: mod_base = OTHER; note = 2'-deoxy-2'-fluoroadenosine-3'-phosphate
  modified_base 19: mod_base = OTHER; note = 2'-O-methylguanosine-3'-phosphate
  modified_base 20: mod_base = OTHER; note = 2'-deoxy-2'-fluorouridine-3'-phosphate
  modified_base 21: mod_base = OTHER; note = 2'-O-methyluridine-3'-phosphorothioate
  modified_base 22: mod_base = OTHER; note = 2'-deoxy-2'-fluoroguanosine-3'-phosphorothioate
  modified_base 23: mod_base = OTHER; note = 2'-O-methylcytidine
tttgaattaagttagttagttgc

SEQ ID NO: 1098 - RNA, 23 nt, synthetic construct
  source 1..23: mol_type = other RNA
  modified_base 1: mod_base = OTHER; note = 2'-O-methyluridine-3'-phosphate
  modified_base 2: mod_base = OTHER; note = 2'-deoxy-2'-fluorouridine-3'-phosphate
  modified_base 3: mod_base = OTHER; note = 2'-O-methyluridine-3'-phosphate
  modified_base 4: mod_base = OTHER; note = 2'-deoxy-2'-fluoroadenosine-3'-phosphate
  modified_base 5: mod_base = OTHER; note = 2'-O-methyluridine-3'-phosphate
  modified_base 6: mod_base = OTHER; note = 2'-deoxy-2'-fluorouridine-3'-phosphate
  modified_base 7: mod_base = OTHER; note = 2'-O-methyluridine-3'-phosphate
  modified_base 8: mod_base = OTHER; note = 2'-deoxy-2'-fluoroguanosine-3'-phosphate
  modified_base 9: mod_base = OTHER; note = 2'-O-methyladenosine-3'-phosphate
  modified_base 10: mod_base = OTHER; note = 2'-deoxy-2'-fluorocytidine-3'-phosphate
  modified_base 11: mod_base = OTHER; note = 2'-O-methyluridine-3'-phosphate
  modified_base 12: mod_base = OTHER; note = 2'-O-methyladenosine-3'-phosphate
  modified_base 13: mod_base = OTHER; note = 2'-O-methyluridine-3'-phosphate
  modified_base 14: mod_base = OTHER; note = 2'-deoxy-2'-fluoroguanosine-3'-phosphate
  modified_base 15: mod_base = OTHER; note = 2'-O-methylcytidine-3'-phosphate
  modified_base 16: mod_base = OTHER; note = 2'-deoxy-2'-fluorouridine-3'-phosphate
  modified_base 17: mod_base = OTHER; note = 2'-O-methylguanosine-3'-phosphate
  modified_base 18: mod_base = OTHER; note = 2'-deoxy-2'-fluorouridine-3'-phosphate
  modified_base 19: mod_base = OTHER; note = 2'-O-methyluridine-3'-phosphate
  modified_base 20: mod_base = OTHER; note = 2'-deoxy-2'-fluoroguanosine-3'-phosphate
  modified_base 21: mod_base = OTHER; note = 2'-O-methylguanosine-3'-phosphorothioate
  modified_base 22: mod_base = OTHER; note = 2'-deoxy-2'-fluorouridine-3'-phosphorothioate
  modified_base 23: mod_base = OTHER; note = 2'-O-methyluridine
tttatttgactatgctgttggtt

SEQ ID NO: 1099 - RNA, 23 nt, synthetic construct
  source 1..23: mol_type = other RNA
  modified_base 1: mod_base = OTHER; note = 2'-O-methyladenosine-3'-phosphate
  modified_base 2: mod_base = OTHER; note = 2'-deoxy-2'-fluorouridine-3'-phosphate
  modified_base 3: mod_base = OTHER; note = 2'-O-methyladenosine-3'-phosphate
  modified_base 4: mod_base = OTHER; note = 2'-deoxy-2'-fluoroguanosine-3'-phosphate
  modified_base 5: mod_base = OTHER; note = 2'-O-methyladenosine-3'-phosphate
  modified_base 6: mod_base = OTHER; note = 2'-deoxy-2'-fluoroguanosine-3'-phosphate
  modified_base 7: mod_base = OTHER; note = 2'-O-methyladenosine-3'-phosphate
  modified_base 8: mod_base = OTHER; note = 2'-deoxy-2'-fluoroadenosine-3'-phosphate
  modified_base 9: mod_base = OTHER; note = 2'-O-methyladenosine-3'-phosphate
  modified_base 10: mod_base = OTHER; note = 2'-deoxy-2'-fluorouridine-3'-phosphate
  modified_base 11: mod_base = OTHER; note = 2'-O-methyluridine-3'-phosphate
  modified_base 12: mod_base = OTHER; note = 2'-O-methyluridine-3'-phosphate
  modified_base 13: mod_base = OTHER; note = 2'-O-methylcytidine-3'-phosphate
  modified_base 14: mod_base = OTHER; note = 2'-deoxy-2'-fluorouridine-3'-phosphate
  modified_base 15: mod_base = OTHER; note = 2'-O-methylguanosine-3'-phosphate
  modified_base 16: mod_base = OTHER; note = 2'-deoxy-2'-fluorouridine-3'-phosphate
  modified_base 17: mod_base = OTHER; note = 2'-O-methylguanosine-3'-phosphate
  modified_base 18: mod_base = OTHER; note = 2'-deoxy-2'-fluoroguanosine-3'-phosphate
  modified_base 19: mod_base = OTHER; note = 2'-O-methylguanosine-3'-phosphate
  modified_base 20: mod_base = OTHER; note = 2'-deoxy-2'-fluorouridine-3'-phosphate
  modified_base 21: mod_base = OTHER; note = 2'-O-methyluridine-3'-phosphorothioate
  modified_base 22: mod_base = OTHER; note = 2'-deoxy-2'-fluorocytidine-3'-phosphorothioate
  modified_base 23: mod_base = OTHER; note = 2'-O-methyluridine
atagagaaatttctgtgggttct

SEQ ID NO: 1100 - RNA, 23 nt, synthetic construct
  source 1..23: mol_type = other RNA
  modified_base 1: mod_base = OTHER; note = 2'-O-methyluridine-3'-phosphate
  modified_base 2: mod_base = OTHER; note = 2'-deoxy-2'-fluorouridine-3'-phosphate
  modified_base 3: mod_base = OTHER; note = 2'-O-methylguanosine-3'-phosphate
  modified_base 4: mod_base = OTHER; note = 2'-deoxy-2'-fluoroadenosine-3'-phosphate
  modified_base 5: mod_base = OTHER; note = 2'-O-methylguanosine-3'-phosphate
  modified_base 6: mod_base = OTHER; note = 2'-deoxy-2'-fluorouridine-3'-phosphate
  modified_base 7: mod_base = OTHER; note = 2'-O-methyluridine-3'-phosphate
  modified_base 8: mod_base = OTHER; note = 2'-deoxy-2'-fluoroguanosine-3'-phosphate
  modified_base 9: mod_base = OTHER; note = 2'-O-methyladenosine-3'-phosphate
  modified_base 10: mod_base = OTHER; note = 2'-deoxy-2'-fluoroguanosine-3'-phosphate
  modified_base 11: mod_base = OTHER; note = 2'-O-methyluridine-3'-phosphate
  modified_base 12: mod_base = OTHER; note = 2'-O-methyluridine-3'-phosphate
  modified_base 13: mod_base = OTHER; note = 2'-O-methylcytidine-3'-phosphate
  modified_base 14: mod_base = OTHER; note = 2'-deoxy-2'-fluoroadenosine-3'-phosphate
  modified_base 15: mod_base = OTHER; note = 2'-O-methyladenosine-3'-phosphate
  modified_base 16: mod_base = OTHER; note = 2'-deoxy-2'-fluoroguanosine-3'-phosphate
  modified_base 17: mod_base = OTHER; note = 2'-O-methyluridine-3'-phosphate
  modified_base 18: mod_base = OTHER; note = 2'-deoxy-2'-fluoroguanosine-3'-phosphate
  modified_base 19: mod_base = OTHER; note = 2'-O-methyladenosine-3'-phosphate
  modified_base 20: mod_base = OTHER; note = 2'-deoxy-2'-fluorocytidine-3'-phosphate
  modified_base 21: mod_base = OTHER; note = 2'-O-methyladenosine-3'-phosphorothioate
  modified_base 22: mod_base = OTHER; note = 2'-deoxy-2'-fluorouridine-3'-phosphorothioate
  modified_base 23: mod_base = OTHER; note = 2'-O-methyladenosine
ttgagttgagttcaagtgacata

SEQ ID NO: 1101 - RNA, 23 nt, synthetic construct
  source 1..23: mol_type = other RNA
  modified_base 1: mod_base = OTHER; note = 2'-O-methyluridine-3'-phosphate
  modified_base 2: mod_base = OTHER; note = 2'-deoxy-2'-fluorouridine-3'-phosphate
  modified_base 3: mod_base = OTHER; note = 2'-O-methyluridine-3'-phosphate
  modified_base 4: mod_base = OTHER; note = 2'-deoxy-2'-fluorouridine-3'-phosphate
  modified_base 5: mod_base = OTHER; note = 2'-O-methyluridine-3'-phosphate
  modified_base 6: mod_base = OTHER; note = 2'-deoxy-2'-fluorocytidine-3'-phosphate
  modified_base 7: mod_base = OTHER; note = 2'-O-methyluridine-3'-phosphate
  modified_base 8: mod_base = OTHER; note = 2'-deoxy-2'-fluorouridine-3'-phosphate
  modified_base 9: mod_base = OTHER; note = 2'-O-methylcytidine-3'-phosphate
  modified_base 10: mod_base = OTHER; note = 2'-deoxy-2'-fluorouridine-3'-phosphate
  modified_base 11: mod_base = OTHER; note = 2'-O-methyladenosine-3'-phosphate
  modified_base 12: mod_base = OTHER; note = 2'-O-methylguanosine-3'-phosphate
  modified_base 13: mod_base = OTHER; note = 2'-O-methylguanosine-3'-phosphate
  modified_base 14: mod_base = OTHER; note = 2'-deoxy-2'-fluoroadenosine-3'-phosphate
  modified_base 15: mod_base = OTHER; note = 2'-O-methylguanosine-3'-phosphate
  modified_base 16: mod_base = OTHER; note = 2'-deoxy-2'-fluoroguanosine-3'-phosphate
  modified_base 17: mod_base = OTHER; note = 2'-O-methylcytidine-3'-phosphate
  modified_base 18: mod_base = OTHER; note = 2'-deoxy-2'-fluorouridine-3'-phosphate
  modified_base 19: mod_base = OTHER; note = 2'-O-methyluridine-3'-phosphate
  modified_base 20: mod_base = OTHER; note = 2'-deoxy-2'-fluorouridine-3'-phosphate
  modified_base 21: mod_base = OTHER; note = 2'-O-methylcytidine-3'-phosphorothioate
  modified_base 22: mod_base = OTHER; note = 2'-deoxy-2'-fluoroadenosine-3'-phosphorothioate
  modified_base 23: mod_base = OTHER; note = 2'-O-methyladenosine
tttttcttctaggaggctttcaa

SEQ ID NO: 1102 - RNA, 23 nt, synthetic construct
  source 1..23: mol_type = other RNA
  modified_base 1: mod_base = OTHER; note = 2'-O-methyluridine-3'-phosphate
  modified_base 2: mod_base = OTHER; note = 2'-deoxy-2'-fluorouridine-3'-phosphate
  modified_base 3: mod_base = OTHER; note = 2'-O-methyladenosine-3'-phosphate
  modified_base 4: mod_base = OTHER; note = 2'-deoxy-2'-fluoroguanosine-3'-phosphate
  modified_base 5: mod_base = OTHER; note = 2'-O-methyluridine-3'-phosphate
  modified_base 6: mod_base = OTHER; note = 2'-deoxy-2'-fluorouridine-3'-phosphate
  modified_base 7: mod_base = OTHER; note = 2'-O-methylguanosine-3'-phosphate
  modified_base 8: mod_base = OTHER; note = 2'-deoxy-2'-fluorocytidine-3'-phosphate
  modified_base 9: mod_base = OTHER; note = 2'-O-methyluridine-3'-phosphate
  modified_base 10: mod_base = OTHER; note = 2'-deoxy-2'-fluorocytidine-3'-phosphate
  modified_base 11: mod_base = OTHER; note = 2'-O-methyluridine-3'-phosphate
  modified_base 12: mod_base = OTHER; note = 2'-O-methyluridine-3'-phosphate
  modified_base 13: mod_base = OTHER; note = 2'-O-methylcytidine-3'-phosphate
  modified_base 14: mod_base = OTHER; note = 2'-deoxy-2'-fluorouridine-3'-phosphate
  modified_base 15: mod_base = OTHER; note = 2'-O-methyladenosine-3'-phosphate
  modified_base 16: mod_base = OTHER; note = 2'-deoxy-2'-fluoroadenosine-3'-phosphate
  modified_base 17: mod_base = OTHER; note = 2'-O-methyladenosine-3'-phosphate
  modified_base 18: mod_base = OTHER; note = 2'-deoxy-2'-fluorouridine-3'-phosphate
  modified_base 19: mod_base = OTHER; note = 2'-O-methyladenosine-3'-phosphate
  modified_base 20: mod_base = OTHER; note = 2'-deoxy-2'-fluorouridine-3'-phosphate
  modified_base 21: mod_base = OTHER; note = 2'-O-methyluridine-3'-phosphorothioate
  modified_base 22: mod_base = OTHER; note = 2'-deoxy-2'-fluorouridine-3'-phosphorothioate
  modified_base 23: mod_base = OTHER; note = 2'-O-methylcytidine
ttagttgctcttctaaatatttc

SEQ ID NO: 1103 - RNA, 23 nt, synthetic construct
  source 1..23: mol_type = other RNA
  modified_base 1: mod_base = OTHER; note = 2'-O-methyluridine-3'-phosphate
  modified_base 2: mod_base = OTHER; note = 2'-deoxy-2'-fluorouridine-3'-phosphate
  modified_base 3: mod_base = OTHER; note = 2'-O-methyluridine-3'-phosphate
  modified_base 4: mod_base = OTHER; note = 2'-deoxy-2'-fluorouridine-3'-phosphate
  modified_base 5: mod_base = OTHER; note = 2'-O-methylguanosine-3'-phosphate
  modified_base 6: mod_base = OTHER; note = 2'-deoxy-2'-fluoroadenosine-3'-phosphate
  modified_base 7: mod_base = OTHER; note = 2'-O-methyladenosine-3'-phosphate
  modified_base 8: mod_base = OTHER; note = 2'-deoxy-2'-fluorouridine-3'-phosphate
  modified_base 9: mod_base = OTHER; note = 2'-O-methyluridine-3'-phosphate
  modified_base 10: mod_base = OTHER; note = 2'-deoxy-2'-fluoroadenosine-3'-phosphate
  modified_base 11: mod_base = OTHER; note = 2'-O-methyladenosine-3'-phosphate
  modified_base 12: mod_base = OTHER; note = 2'-O-methylguanosine-3'-phosphate
  modified_base 13: mod_base = OTHER; note = 2'-O-methyluridine-3'-phosphate
  modified_base 14: mod_base = OTHER; note = 2'-deoxy-2'-fluorouridine-3'-phosphate
  modified_base 15: mod_base = OTHER; note = 2'-O-methyladenosine-3'-phosphate
  modified_base 16: mod_base = OTHER; note = 2'-deoxy-2'-fluoroguanosine-3'-phosphate
  modified_base 17: mod_base = OTHER; note = 2'-O-methyluridine-3'-phosphate
  modified_base 18: mod_base = OTHER; note = 2'-deoxy-2'-fluorouridine-3'-phosphate
  modified_base 19: mod_base = OTHER; note = 2'-O-methyladenosine-3'-phosphate
  modified_base 20: mod_base = OTHER; note = 2'-deoxy-2'-fluoroguanosine-3'-phosphate
  modified_base 21: mod_base = OTHER; note = 2'-O-methyluridine-3'-phosphorothioate
  modified_base 22: mod_base = OTHER; note = 2'-deoxy-2'-fluorouridine-3'-phosphorothioate
  modified_base 23: mod_base = OTHER; note = 2'-O-methylguanosine
ttttgaattaagttagttagttg

SEQ ID NO: 1104 - RNA, 23 nt, synthetic construct
  source 1..23: mol_type = other RNA
  modified_base 1: mod_base = OTHER; note = 2'-O-methyluridine-3'-phosphate
  modified_base 2: mod_base = OTHER; note = 2'-deoxy-2'-fluorouridine-3'-phosphate
  modified_base 3: mod_base = OTHER; note = 2'-O-methyluridine-3'-phosphate
  modified_base 4: mod_base = OTHER; note = 2'-deoxy-2'-fluorouridine-3'-phosphate
  modified_base 5: mod_base = OTHER; note = 2'-O-methyladenosine-3'-phosphate
  modified_base 6: mod_base = OTHER; note = 2'-deoxy-2'-fluorouridine-3'-phosphate
  modified_base 7: mod_base = OTHER; note = 2'-O-methyluridine-3'-phosphate
  modified_base 8: mod_base = OTHER; note = 2'-deoxy-2'-fluorouridine-3'-phosphate
  modified_base 9: mod_base = OTHER; note = 2'-O-methylguanosine-3'-phosphate
  modified_base 10: mod_base = OTHER; note = 2'-deoxy-2'-fluoroadenosine-3'-phosphate
  modified_base 11: mod_base = OTHER; note = 2'-O-methylcytidine-3'-phosphate
  modified_base 12: mod_base = OTHER; note = 2'-O-methyluridine-3'-phosphate
  modified_base 13: mod_base = OTHER; note = 2'-O-methyladenosine-3'-phosphate
  modified_base 14: mod_base = OTHER; note = 2'-deoxy-2'-fluorouridine-3'-phosphate
  modified_base 15: mod_base = OTHER; note = 2'-O-methylguanosine-3'-phosphate
  modified_base 16: mod_base = OTHER; note = 2'-deoxy-2'-fluorocytidine-3'-phosphate
  modified_base 17: mod_base = OTHER; note = 2'-O-methyluridine-3'-phosphate
  modified_base 18: mod_base = OTHER; note = 2'-deoxy-2'-fluoroguanosine-3'-phosphate
  modified_base 19: mod_base = OTHER; note = 2'-O-methyluridine-3'-phosphate
  modified_base 20: mod_base = OTHER; note = 2'-deoxy-2'-fluorouridine-3'-phosphate
  modified_base 21: mod_base = OTHER; note = 2'-O-methylguanosine-3'-phosphorothioate
  modified_base 22: mod_base = OTHER; note = 2'-deoxy-2'-fluoroguanosine-3'-phosphorothioate
  modified_base 23: mod_base = OTHER; note = 2'-O-methyluridine
ttttatttgactatgctgttggt

SEQ ID NO: 1105 - RNA, 23 nt, synthetic construct
  source 1..23: mol_type = other RNA
  modified_base 1: mod_base = OTHER; note = 2'-O-methyladenosine-3'-phosphate
  modified_base 2: mod_base = OTHER; note = 2'-deoxy-2'-fluoroadenosine-3'-phosphate
  modified_base 3: mod_base = OTHER; note = 2'-O-methylguanosine-3'-phosphate
  modified_base 4: mod_base = OTHER; note = 2'-deoxy-2'-fluoroadenosine-3'-phosphate
  modified_base 5: mod_base = OTHER; note = 2'-O-methyluridine-3'-phosphate
  modified_base 6: mod_base = OTHER; note = 2'-deoxy-2'-fluoroadenosine-3'-phosphate
  modified_base 7: mod_base = OTHER; note = 2'-O-methylguanosine-3'-phosphate
  modified_base 8: mod_base = OTHER; note = 2'-deoxy-2'-fluoroadenosine-3'-phosphate
  modified_base 9: mod_base = OTHER; note = 2'-O-methylguanosine-3'-phosphate
  modified_base 10: mod_base = OTHER; note = 2'-deoxy-2'-fluoroadenosine-3'-phosphate
  modified_base 11: mod_base = OTHER; note = 2'-O-methyladenosine-3'-phosphate
  modified_base 12: mod_base = OTHER; note = 2'-O-methyladenosine-3'-phosphate
  modified_base 13: mod_base = OTHER; note = 2'-O-methyluridine-3'-phosphate
  modified_base 14: mod_base = OTHER; note = 2'-deoxy-2'-fluorouridine-3'-phosphate
  modified_base 15: mod_base = OTHER; note = 2'-O-methyluridine-3'-phosphate
  modified_base 16: mod_base = OTHER; note = 2'-deoxy-2'-fluorocytidine-3'-phosphate
  modified_base 17: mod_base = OTHER; note = 2'-O-methyluridine-3'-phosphate
  modified_base 18: mod_base = OTHER; note = 2'-deoxy-2'-fluoroguanosine-3'-phosphate
  modified_base 19: mod_base = OTHER; note = 2'-O-methyluridine-3'-phosphate
  modified_base 20: mod_base = OTHER; note = 2'-deoxy-2'-fluoroguanosine-3'-phosphate
  modified_base 21: mod_base = OTHER; note = 2'-O-methylguanosine-3'-phosphorothioate
  modified_base 22: mod_base = OTHER; note = 2'-deoxy-2'-fluoroguanosine-3'-phosphorothioate
  modified_base 23: mod_base = OTHER; note = 2'-O-methyluridine
aagatagagaaatttctgtgggt

SEQ ID NO: 1106 - RNA, 23 nt, synthetic construct
  source 1..23: mol_type = other RNA
  modified_base 1: mod_base = OTHER; note = 2'-O-methyluridine-3'-phosphate
  modified_base 2: mod_base = OTHER; note = 2'-deoxy-2'-fluorouridine-3'-phosphate
  modified_base 3: mod_base = OTHER; note = 2'-O-methyluridine-3'-phosphate
  modified_base 4: mod_base = OTHER; note = 2'-deoxy-2'-fluoroguanosine-3'-phosphate
  modified_base 5: mod_base = OTHER; note = 2'-O-methyladenosine-3'-phosphate
  modified_base 6: mod_base = OTHER; note = 2'-deoxy-2'-fluoroguanosine-3'-phosphate
  modified_base 7: mod_base = OTHER; note = 2'-O-methyluridine-3'-phosphate
  modified_base 8: mod_base = OTHER; note = 2'-deoxy-2'-fluorouridine-3'-phosphate
  modified_base 9: mod_base = OTHER; note = 2'-O-methylguanosine-3'-phosphate
  modified_base 10: mod_base = OTHER; note = 2'-deoxy-2'-fluoroadenosine-3'-phosphate
  modified_base 11: mod_base = OTHER; note = 2'-O-methylguanosine-3'-phosphate
  modified_base 12: mod_base = OTHER; note = 2'-O-methyluridine-3'-phosphate
  modified_base 13: mod_base = OTHER; note = 2'-O-methyluridine-3'-phosphate
  modified_base 14: mod_base = OTHER; note = 2'-deoxy-2'-fluorocytidine-3'-phosphate
  modified_base 15: mod_base = OTHER; note = 2'-O-methyladenosine-3'-phosphate
  modified_base 16: mod_base = OTHER; note = 2'-deoxy-2'-fluoroadenosine-3'-phosphate
  modified_base 17: mod_base = OTHER; note = 2'-O-methylguanosine-3'-phosphate
  modified_base 18: mod_base = OTHER; note = 2'-deoxy-2'-fluorouridine-3'-phosphate
  modified_base 19: mod_base = OTHER; note = 2'-O-methylguanosine-3'-phosphate
  modified_base 20: mod_base = OTHER; note = 2'-deoxy-2'-fluoroadenosine-3'-phosphate
  modified_base 21: mod_base = OTHER; note = 2'-O-methylcytidine-3'-phosphorothioate
  modified_base 22: mod_base = OTHER; note = 2'-deoxy-2'-fluoroadenosine-3'-phosphorothioate
  modified_base 23: mod_base = OTHER; note = 2'-O-methyluridine
tttgagttgagttcaagtgacat

SEQ ID NO: 1107 - RNA, 23 nt, synthetic construct
  source 1..23: mol_type = other RNA
  modified_base 1: mod_base = OTHER; note = 2'-O-methyluridine-3'-phosphate
  modified_base 2: mod_base = OTHER; note = 2'-deoxy-2'-fluoroadenosine-3'-phosphate
  modified_base 3: mod_base = OTHER; note = 2'-O-methylguanosine-3'-phosphate
  modified_base 4: mod_base = OTHER; note = 2'-deoxy-2'-fluoroadenosine-3'-phosphate
  modified_base 5: mod_base = OTHER; note = 2'-O-methyladenosine-3'-phosphate
  modified_base 6: mod_base = OTHER; note = 2'-deoxy-2'-fluorouridine-3'-phosphate
  modified_base 7: mod_base = OTHER; note = 2'-O-methyluridine-3'-phosphate
  modified_base 8: mod_base = OTHER; note = 2'-deoxy-2'-fluorouridine-3'-phosphate
  modified_base 9: mod_base = OTHER; note = 2'-O-methyluridine-3'-phosphate
  modified_base 10: mod_base = OTHER; note = 2'-deoxy-2'-fluorouridine-3'-phosphate
  modified_base 11: mod_base = OTHER; note = 2'-O-methyluridine-3'-phosphate
  modified_base 12: mod_base = OTHER; note = 2'-O-methylcytidine-3'-phosphate
  modified_base 13: mod_base = OTHER; note = 2'-O-methyluridine-3'-phosphate
  modified_base 14: mod_base = OTHER; note = 2'-deoxy-2'-fluorouridine-3'-phosphate
  modified_base 15: mod_base = OTHER; note = 2'-O-methylcytidine-3'-phosphate
  modified_base 16: mod_base = OTHER; note = 2'-deoxy-2'-fluorouridine-3'-phosphate
  modified_base 17: mod_base = OTHER; note = 2'-O-methyladenosine-3'-phosphate
  modified_base 18: mod_base = OTHER; note = 2'-deoxy-2'-fluoroguanosine-3'-phosphate
  modified_base 19: mod_base = OTHER; note = 2'-O-methylguanosine-3'-phosphate
  modified_base 20: mod_base = OTHER; note = 2'-deoxy-2'-fluoroadenosine-3'-phosphate
  modified_base 21: mod_base = OTHER; note = 2'-O-methylguanosine-3'-phosphorothioate
  modified_base 22: mod_base = OTHER; note = 2'-deoxy-2'-fluoroguanosine-3'-phosphorothioate
  modified_base 23: mod_base = OTHER; note = 2'-O-methylcytidine
tagaattttttcttctaggaggc

SEQ ID NO: 1108 - RNA, 23 nt, synthetic construct
  source 1..23: mol_type = other RNA
  modified_base 1: mod_base = OTHER; note = 2'-O-methyluridine-3'-phosphate
  modified_base 2: mod_base = OTHER; note = 2'-deoxy-2'-fluoroadenosine-3'-phosphate
  modified_base 3: mod_base = OTHER; note = 2'-O-methylguanosine-3'-phosphate
  modified_base 4: mod_base = OTHER; note = 2'-deoxy-2'-fluorouridine-3'-phosphate
  modified_base 5: mod_base = OTHER; note = 2'-O-methyluridine-3'-phosphate
  modified_base 6: mod_base = OTHER; note = 2'-deoxy-2'-fluoroadenosine-3'-phosphate
  modified_base 7: mod_base = OTHER; note = 2'-O-methylguanosine-3'-phosphate
  modified_base 8: mod_base = OTHER; note = 2'-deoxy-2'-fluorouridine-3'-phosphate
  modified_base 9: mod_base = OTHER; note = 2'-O-methyluridine-3'-phosphate
  modified_base 10: mod_base = OTHER; note = 2'-deoxy-2'-fluoroguanosine-3'-phosphate
  modified_base 11: mod_base = OTHER; note = 2'-O-methylcytidine-3'-phosphate
  modified_base 12: mod_base = OTHER; note = 2'-O-methyluridine-3'-phosphate
  modified_base 13: mod_base = OTHER; note = 2'-O-methylcytidine-3'-phosphate
  modified_base 14: mod_base = OTHER; note = 2'-deoxy-2'-fluorouridine-3'-phosphate
  modified_base 15: mod_base = OTHER; note = 2'-O-methyluridine-3'-phosphate
  modified_base 16: mod_base = OTHER; note = 2'-deoxy-2'-fluorocytidine-3'-phosphate
  modified_base 17: mod_base = OTHER; note = 2'-O-methyluridine-3'-phosphate
  modified_base 18: mod_base = OTHER; note = 2'-deoxy-2'-fluoroadenosine-3'-phosphate
  modified_base 19: mod_base = OTHER; note = 2'-O-methyladenosine-3'-phosphate
  modified_base 20: mod_base = OTHER; note = 2'-deoxy-2'-fluoroadenosine-3'-phosphate
  modified_base 21: mod_base = OTHER; note = 2'-O-methyluridine-3'-phosphorothioate
  modified_base 22: mod_base = OTHER; note = 2'-deoxy-2'-fluoroadenosine-3'-phosphorothioate
  modified_base 23: mod_base = OTHER; note = 2'-O-methyluridine
tagttagttgctcttctaaatat

SEQ ID NO: 1109 - RNA, 23 nt, synthetic construct
  source 1..23: mol_type = other RNA
  modified_base 1: mod_base = OTHER; note = 2'-O-methyladenosine-3'-phosphate
  modified_base 2: mod_base = OTHER; note = 2'-deoxy-2'-fluorouridine-3'-phosphate
  modified_base 3: mod_base = OTHER; note = 2'-O-methyluridine-3'-phosphate
  modified_base 4: mod_base = OTHER; note = 2'-deoxy-2'-fluorouridine-3'-phosphate
  modified_base 5: mod_base = OTHER; note = 2'-O-methyluridine-3'-phosphate
  modified_base 6: mod_base = OTHER; note = 2'-deoxy-2'-fluoroguanosine-3'-phosphate
  modified_base 7: mod_base = OTHER; note = 2'-O-methyladenosine-3'-phosphate
  modified_base 8: mod_base = OTHER; note = 2'-deoxy-2'-fluoroadenosine-3'-phosphate
  modified_base 9: mod_base = OTHER; note = 2'-O-methyluridine-3'-phosphate
  modified_base 10: mod_base = OTHER; note = 2'-deoxy-2'-fluorouridine-3'-phosphate
  modified_base 11: mod_base = OTHER; note = 2'-O-methyladenosine-3'-phosphate
  modified_base 12: mod_base = OTHER; note = 2'-O-methyladenosine-3'-phosphate
  modified_base 13: mod_base = OTHER; note = 2'-O-methylguanosine-3'-phosphate
  modified_base 14: mod_base = OTHER; note = 2'-deoxy-2'-fluorouridine-3'-phosphate
  modified_base 15: mod_base = OTHER; note = 2'-O-methyluridine-3'-phosphate
  modified_base 16: mod_base = OTHER; note = 2'-deoxy-2'-fluoroadenosine-3'-phosphate
  modified_base 17: mod_base = OTHER; note = 2'-O-methylguanosine-3'-phosphate
  modified_base 18: mod_base = OTHER; note = 2'-deoxy-2'-fluorouridine-3'-phosphate
  modified_base 19: mod_base = OTHER; note = 2'-O-methyluridine-3'-phosphate
  modified_base 20: mod_base = OTHER; note = 2'-deoxy-2'-fluoroadenosine-3'-phosphate
  modified_base 21: mod_base = OTHER; note = 2'-O-methylguanosine-3'-phosphorothioate
  modified_base 22: mod_base = OTHER; note = 2'-deoxy-2'-fluorouridine-3'-phosphorothioate
  modified_base 23: mod_base = OTHER; note = 2'-O-methyluridine
attttgaattaagttagttagtt

SEQ ID NO: 1110 - RNA, 23 nt, synthetic construct
  source 1..23: mol_type = other RNA
  modified_base 1: mod_base = OTHER; note = 2'-O-methyluridine-3'-phosphate
  modified_base 2: mod_base = OTHER; note = 2'-deoxy-2'-fluorouridine-3'-phosphate
  modified_base 3: mod_base = OTHER; note = 2'-O-methylcytidine-3'-phosphate
  modified_base 4: mod_base = OTHER; note = 2'-deoxy-2'-fluorouridine-3'-phosphate
  modified_base 5: mod_base = OTHER; note = 2'-O-methyluridine-3'-phosphate
  modified_base 6: mod_base = OTHER; note = 2'-deoxy-2'-fluorouridine-3'-phosphate
  modified_base 7: mod_base = OTHER; note = 2'-O-methyluridine-3'-phosphate
  modified_base 8: mod_base = OTHER; note = 2'-deoxy-2'-fluoroadenosine-3'-phosphate
  modified_base 9: mod_base = OTHER; note = 2'-O-methyluridine-3'-phosphate
  modified_base 10: mod_base = OTHER; note = 2'-deoxy-2'-fluorouridine-3'-phosphate
  modified_base 11: mod_base = OTHER; note = 2'-O-methyluridine-3'-phosphate
  modified_base 12: mod_base = OTHER; note = 2'-O-methylguanosine-3'-phosphate
  modified_base 13: mod_base = OTHER; note = 2'-O-methyladenosine-3'-phosphate
  modified_base 14: mod_base = OTHER; note = 2'-deoxy-2'-fluorocytidine-3'-phosphate
  modified_base 15: mod_base = OTHER; note = 2'-O-methyluridine-3'-phosphate
  modified_base 16: mod_base = OTHER; note = 2'-deoxy-2'-fluoroadenosine-3'-phosphate
  modified_base 17: mod_base = OTHER; note = 2'-O-methyluridine-3'-phosphate
  modified_base 18: mod_base = OTHER; note = 2'-deoxy-2'-fluoroguanosine-3'-phosphate
  modified_base 19: mod_base = OTHER; note = 2'-O-methylcytidine-3'-phosphate
  modified_base 20: mod_base = OTHER; note = 2'-deoxy-2'-fluorouridine-3'-phosphate
  modified_base 21: mod_base = OTHER; note = 2'-O-methylguanosine-3'-phosphorothioate
  modified_base 22: mod_base = OTHER; note = 2'-deoxy-2'-fluorouridine-3'-phosphorothioate
  modified_base 23: mod_base = OTHER; note = 2'-O-methyluridine
ttcttttatttgactatgctgtt

SEQ ID NO: 1111 - RNA, 23 nt, synthetic construct
  source 1..23: mol_type = other RNA
  modified_base 1: mod_base = OTHER; note = 2'-O-methyladenosine-3'-phosphate
  modified_base 2: mod_base = OTHER; note = 2'-deoxy-2'-fluorouridine-3'-phosphate
  modified_base 3: mod_base = OTHER; note = 2'-O-methylguanosine-3'-phosphate
  modified_base 4: mod_base = OTHER; note = 2'-deoxy-2'-fluorouridine-3'-phosphate
  modified_base 5: mod_base = OTHER; note = 2'-O-methyluridine-3'-phosphate
  modified_base 6: mod_base = OTHER; note = 2'-deoxy-2'-fluorouridine-3'-phosphate
  modified_base 7: mod_base = OTHER; note = 2'-O-methyluridine-3'-phosphate
  modified_base 8: mod_base = OTHER; note = 2'-deoxy-2'-fluoroadenosine-3'-phosphate
  modified_base 9: mod_base = OTHER; note = 2'-O-methylcytidine-3'-phosphate
  modified_base 10: mod_base = OTHER; note = 2'-deoxy-2'-fluoroadenosine-3'-phosphate
  modified_base 11: mod_base = OTHER; note = 2'-O-methyluridine-3'-phosphate
  modified_base 12: mod_base = OTHER; note = 2'-O-methyluridine-3'-phosphate
  modified_base 13: mod_base = OTHER; note = 2'-O-methyluridine-3'-phosphate
  modified_base 14: mod_base = OTHER; note = 2'-deoxy-2'-fluorocytidine-3'-phosphate
  modified_base 15: mod_base = OTHER; note = 2'-O-methyluridine-3'-phosphate
  modified_base 16: mod_base = OTHER; note = 2'-deoxy-2'-fluorouridine-3'-phosphate
  modified_base 17: mod_base = OTHER; note = 2'-O-methyladenosine-3'-phosphate
  modified_base 18: mod_base = OTHER; note = 2'-deoxy-2'-fluorouridine-3'-phosphate
  modified_base 19: mod_base = OTHER; note = 2'-O-methyluridine-3'-phosphate
  modified_base 20: mod_base = OTHER; note = 2'-deoxy-2'-fluorouridine-3'-phosphate
  modified_base 21: mod_base = OTHER; note = 2'-O-methylcytidine-3'-phosphorothioate
  modified_base 22: mod_base = OTHER; note = 2'-deoxy-2'-fluoroadenosine-3'-phosphorothioate
  modified_base 23: mod_base = OTHER; note = 2'-O-methyluridine
atgttttacatttcttatttcat

SEQ ID NO: 1112 - RNA, 23 nt, synthetic construct
  source 1..23: mol_type = other RNA
  modified_base 1: mod_base = OTHER; note = 2'-O-methyluridine-3'-phosphate
  modified_base 2: mod_base = OTHER; note = 2'-deoxy-2'-fluorouridine-3'-phosphate
  modified_base 3: mod_base = OTHER; note = 2'-O-methyluridine-3'-phosphate
  modified_base 4: mod_base = OTHER; note = 2'-deoxy-2'-fluorouridine-3'-phosphate
  modified_base 5: mod_base = OTHER; note = 2'-O-methylguanosine-3'-phosphate
  modified_base 6: mod_base = OTHER; note = 2'-deoxy-2'-fluoroadenosine-3'-phosphate
  modified_base 7: mod_base = OTHER; note = 2'-O-methylguanosine-3'-phosphate
  modified_base 8: mod_base = OTHER; note = 2'-deoxy-2'-fluorouridine-3'-phosphate
  modified_base 9: mod_base = OTHER; note = 2'-O-methyluridine-3'-phosphate
  modified_base 10: mod_base = OTHER; note = 2'-deoxy-2'-fluoroguanosine-3'-phosphate
  modified_base 11: mod_base = OTHER; note = 2'-O-methyladenosine-3'-phosphate
  modified_base 12: mod_base = OTHER; note = 2'-O-methylguanosine-3'-phosphate
  modified_base 13: mod_base = OTHER; note = 2'-O-methyluridine-3'-phosphate
  modified_base 14: mod_base = OTHER; note = 2'-deoxy-2'-fluorouridine-3'-phosphate
  modified_base 15: mod_base = OTHER; note = 2'-O-methylcytidine-3'-phosphate
  modified_base 16: mod_base = OTHER; note = 2'-deoxy-2'-fluoroadenosine-3'-phosphate
  modified_base 17: mod_base = OTHER; note = 2'-O-methyladenosine-3'-phosphate
  modified_base 18: mod_base = OTHER; note = 2'-deoxy-2'-fluoroguanosine-3'-phosphate
  modified_base 19: mod_base = OTHER; note = 2'-O-methyluridine-3'-phosphate
  modified_base 20: mod_base = OTHER; note = 2'-deoxy-2'-fluoroguanosine-3'-phosphate
  modified_base 21: mod_base = OTHER; note = 2'-O-methyladenosine-3'-phosphorothioate
  modified_base 22: mod_base = OTHER; note = 2'-deoxy-2'-fluorocytidine-3'-phosphorothioate
  modified_base 23: mod_base = OTHER; note = 2'-O-methyladenosine
ttttgagttgagttcaagtgaca

SEQ ID NO: 1113 - RNA, 23 nt, synthetic construct
  source 1..23: mol_type = other RNA
  modified_base 1: mod_base = OTHER; note = 2'-O-methyluridine-3'-phosphate
  modified_base 2: mod_base = OTHER; note = 2'-deoxy-2'-fluorouridine-3'-phosphate
  modified_base 3: mod_base = OTHER; note = 2'-O-methylcytidine-3'-phosphate
  modified_base 4: mod_base = OTHER; note = 2'-deoxy-2'-fluoroadenosine-3'-phosphate
  modified_base 5: mod_base = OTHER; note = 2'-O-methylcytidine-3'-phosphate
  modified_base 6: mod_base = OTHER; note = 2'-deoxy-2'-fluorouridine-3'-phosphate
  modified_base 7: mod_base = OTHER; note = 2'-O-methyluridine-3'-phosphate
  modified_base 8: mod_base = OTHER; note = 2'-deoxy-2'-fluorouridine-3'-phosphate
  modified_base 9: mod_base = OTHER; note = 2'-O-methyluridine-3'-phosphate
  modified_base 10: mod_base = OTHER; note = 2'-deoxy-2'-fluorouridine-3'-phosphate
  modified_base 11: mod_base = OTHER; note = 2'-O-methylguanosine-3'-phosphate
  modified_base 12: mod_base = OTHER; note = 2'-O-methyluridine-3'-phosphate
  modified_base 13: mod_base = OTHER; note = 2'-O-methyluridine-3'-phosphate
  modified_base 14: mod_base = OTHER; note = 2'-deoxy-2'-fluoroguanosine-3'-phosphate
  modified_base 15: mod_base = OTHER; note = 2'-O-methyladenosine-3'-phosphate
  modified_base 16: mod_base = OTHER; note = 2'-deoxy-2'-fluoroadenosine-3'-phosphate
  modified_base 17: mod_base = OTHER; note = 2'-O-methylguanosine-3'-phosphate
  modified_base 18: mod_base = OTHER; note = 2'-deoxy-2'-fluorouridine-3'-phosphate
  modified_base 19: mod_base = OTHER; note = 2'-O-methyladenosine-3'-phosphate
  modified_base 20: mod_base = OTHER; note = 2'-deoxy-2'-fluoroguanosine-3'-phosphate
  modified_base 21: mod_base = OTHER; note = 2'-O-methyladenosine-3'-phosphorothioate
  modified_base 22: mod_base = OTHER; note = 2'-deoxy-2'-fluoroadenosine-3'-phosphorothioate
  modified_base 23: mod_base = OTHER; note = 2'-O-methyluridine
ttcactttttgttgaagtagaat

SEQ ID NO: 1114 - RNA, 23 nt, synthetic construct
  source 1..23: mol_type = other RNA
  modified_base 1: mod_base = OTHER; note = 2'-O-methyluridine-3'-phosphate
  modified_base 2: mod_base = OTHER; note = 2'-deoxy-2'-fluorouridine-3'-phosphate
  modified_base 3: mod_base = OTHER; note = 2'-O-methyladenosine-3'-phosphate
  modified_base 4: mod_base = OTHER; note = 2'-deoxy-2'-fluoroguanosine-3'-phosphate
  modified_base 5: mod_base = OTHER; note = 2'-O-methyluridine-3'-phosphate
  modified_base 6: mod_base = OTHER; note = 2'-deoxy-2'-fluorouridine-3'-phosphate
  modified_base 7: mod_base = OTHER; note = 2'-O-methyladenosine-3'-phosphate
  modified_base 8: mod_base = OTHER; note = 2'-deoxy-2'-fluoroguanosine-3'-phosphate
  modified_base 9: mod_base = OTHER; note = 2'-O-methyluridine-3'-phosphate
  modified_base 10: mod_base = OTHER; note = 2'-deoxy-2'-fluorouridine-3'-phosphate
  modified_base 11: mod_base = OTHER; note = 2'-O-methylguanosine-3'-phosphate
  modified_base 12: mod_base = OTHER; note = 2'-O-methylcytidine-3'-phosphate
  modified_base 13: mod_base = OTHER; note = 2'-O-methyluridine-3'-phosphate
  modified_base 14: mod_base = OTHER; note = 2'-deoxy-2'-fluorocytidine-3'-phosphate
  modified_base 15: mod_base = OTHER; note = 2'-O-methyluridine-3'-phosphate
  modified_base 16: mod_base = OTHER; note = 2'-deoxy-2'-fluorouridine-3'-phosphate
  modified_base 17: mod_base = OTHER; note = 2'-O-methylcytidine-3'-phosphate
  modified_base 18: mod_base = OTHER; note = 2'-deoxy-2'-fluorouridine-3'-phosphate
  modified_base 19: mod_base = OTHER; note = 2'-O-methyladenosine-3'-phosphate
  modified_base 20: mod_base = OTHER; note = 2'-deoxy-2'-fluoroadenosine-3'-phosphate
  modified_base 21: mod_base = OTHER; note = 2'-O-methyladenosine-3'-phosphorothioate
  modified_base 22: mod_base = OTHER; note = 2'-deoxy-2'-fluorouridine-3'-phosphorothioate
  modified_base 23: mod_base = OTHER; note = 2'-O-methyladenosine
ttagttagttgctcttctaaata

SEQ ID NO: 1115 - RNA, 23 nt, synthetic construct
  source 1..23: mol_type = other RNA
  modified_base 1: mod_base = OTHER; note = 2'-O-methyluridine-3'-phosphate
  modified_base 2: mod_base = OTHER; note = 2'-deoxy-2'-fluorouridine-3'-phosphate
  modified_base 3: mod_base = OTHER; note = 2'-O-methylguanosine-3'-phosphate
  modified_base 4: mod_base = OTHER; note = 2'-deoxy-2'-fluoroadenosine-3'-phosphate
  modified_base 5: mod_base = OTHER; note = 2'-O-methyluridine-3'-phosphate
  modified_base 6: mod_base = OTHER; note = 2'-deoxy-2'-fluoroguanosine-3'-phosphate
  modified_base 7: mod_base = OTHER; note = 2'-O-methylcytidine-3'-phosphate
  modified_base 8: mod_base = OTHER; note = 2'-deoxy-2'-fluorouridine-3'-phosphate
  modified_base 9: mod_base = OTHER; note = 2'-O-methyladenosine-3'-phosphate
  modified_base 10: mod_base = OTHER; note = 2'-deoxy-2'-fluorouridine-3'-phosphate
  modified_base 11: mod_base = OTHER; note = 2'-O-methyluridine-3'-phosphate
  modified_base 12: mod_base = OTHER; note = 2'-O-methyladenosine-3'-phosphate
  modified_base 13: mod_base = OTHER; note = 2'-O-methyluridine-3'-phosphate
  modified_base 14: mod_base = OTHER; note = 2'-deoxy-2'-fluorocytidine-3'-phosphate
  modified_base 15: mod_base = OTHER; note = 2'-O-methyluridine-3'-phosphate
  modified_base 16: mod_base = OTHER; note = 2'-deoxy-2'-fluorouridine-3'-phosphate
  modified_base 17: mod_base = OTHER; note = 2'-O-methylguanosine-3'-phosphate
  modified_base 18: mod_base = OTHER; note = 2'-deoxy-2'-fluorouridine-3'-phosphate
  modified_base 19: mod_base = OTHER; note = 2'-O-methyluridine-3'-phosphate
  modified_base 20: mod_base = OTHER; note = 2'-deoxy-2'-fluorouridine-3'-phosphate
  modified_base 21: mod_base = OTHER; note = 2'-O-methyluridine-3'-phosphorothioate
  modified_base 22: mod_base = OTHER; note = 2'-deoxy-2'-fluorouridine-3'-phosphorothioate
  modified_base 23: mod_base = OTHER; note = 2'-O-methylcytidine
ttgatgctattatcttgtttttc

SEQ ID NO: 1116 - RNA, 23 nt, synthetic construct
  source 1..23: mol_type = other RNA
  modified_base 1: mod_base = OTHER; note = 2'-O-methyluridine-3'-phosphate
  modified_base 2: mod_base = OTHER; note = 2'-deoxy-2'-fluorouridine-3'-phosphate
  modified_base 3: mod_base = OTHER; note = 2'-O-methyluridine-3'-phosphate
  modified_base 4: mod_base = OTHER; note = 2'-deoxy-2'-fluorocytidine-3'-phosphate
  modified_base 5: mod_base = OTHER; note = 2'-O-methyluridine-3'-phosphate
  modified_base 6: mod_base = OTHER; note = 2'-deoxy-2'-fluorouridine-3'-phosphate
  modified_base 7: mod_base = OTHER; note = 2'-O-methyluridine-3'-phosphate
  modified_base 8: mod_base = OTHER; note = 2'-deoxy-2'-fluorouridine-3'-phosphate
  modified_base 9: mod_base = OTHER; note = 2'-O-methyladenosine-3'-phosphate
  modified_base 10: mod_base = OTHER; note = 2'-deoxy-2'-fluorouridine-3'-phosphate
  modified_base 11: mod_base = OTHER; note = 2'-O-methyluridine-3'-phosphate
  modified_base 12: mod_base = OTHER; note = 2'-O-methyluridine-3'-phosphate
  modified_base 13: mod_base = OTHER; note = 2'-O-methylguanosine-3'-phosphate
  modified_base 14: mod_base = OTHER; note = 2'-deoxy-2'-fluoroadenosine-3'-phosphate
  modified_base 15: mod_base = OTHER; note = 2'-O-methylcytidine-3'-phosphate
  modified_base 16: mod_base = OTHER; note = 2'-deoxy-2'-fluorouridine-3'-phosphate
  modified_base 17: mod_base = OTHER; note = 2'-O-methyladenosine-3'-phosphate
  modified_base 18: mod_base = OTHER; note = 2'-deoxy-2'-fluorouridine-3'-phosphate
  modified_base 19: mod_base = OTHER; note = 2'-O-methylguanosine-3'-phosphate
  modified_base 20: mod_base = OTHER; note = 2'-deoxy-2'-fluorocytidine-3'-phosphate
  modified_base 21: mod_base = OTHER; note = 2'-O-methyluridine-3'-phosphorothioate
  modified_base 22: mod_base = OTHER; note = 2'-deoxy-2'-fluoroguanosine-3'-phosphorothioate
  modified_base 23: mod_base = OTHER; note = 2'-O-methyluridine
tttcttttatttgactatgctgt

SEQ ID NO: 1117 - RNA, 23 nt, synthetic construct
  source 1..23: mol_type = other RNA
  modified_base 1: mod_base = OTHER; note = 2'-O-methyladenosine-3'-phosphate
  modified_base 2: mod_base = OTHER; note = 2'-deoxy-2'-fluoroadenosine-3'-phosphate
  modified_base 3: mod_base = OTHER; note = 2'-O-methylcytidine-3'-phosphate
  modified_base 4: mod_base = OTHER; note = 2'-deoxy-2'-fluorouridine-3'-phosphate
  modified_base 5: mod_base = OTHER; note = 2'-O-methyluridine-3'-phosphate
  modified_base 6: mod_base = OTHER; note = 2'-deoxy-2'-fluoroguanosine-3'-phosphate
  modified_base 7: mod_base = OTHER; note = 2'-O-methyladenosine-3'-phosphate
  modified_base 8: mod_base = OTHER; note = 2'-deoxy-2'-fluoroguanosine-3'-phosphate
  modified_base 9: mod_base = OTHER; note = 2'-O-methyladenosine-3'-phosphate
  modified_base 10: mod_base = OTHER; note = 2'-deoxy-2'-fluoroguanosine-3'-phosphate
  modified_base 11: mod_base = OTHER; note = 2'-O-methyluridine-3'-phosphate
  modified_base 12: mod_base = OTHER; note = 2'-O-methyluridine-3'-phosphate
  modified_base 13: mod_base = OTHER; note = 2'-O-methylguanosine-3'-phosphate
  modified_base 14: mod_base = OTHER; note = 2'-deoxy-2'-fluorocytidine-3'-phosphate
  modified_base 15: mod_base = OTHER; note = 2'-O-methyluridine-3'-phosphate
  modified_base 16: mod_base = OTHER; note = 2'-deoxy-2'-fluoroguanosine-3'-phosphate
  modified_base 17: mod_base = OTHER; note = 2'-O-methylguanosine-3'-phosphate
  modified_base 18: mod_base = OTHER; note = 2'-deoxy-2'-fluoroguanosine-3'-phosphate
  modified_base 19: mod_base = OTHER; note = 2'-O-methyluridine-3'-phosphate
  modified_base 20: mod_base = OTHER; note = 2'-deoxy-2'-fluorocytidine-3'-phosphate
  modified_base 21: mod_base = OTHER; note = 2'-O-methyluridine-3'-phosphorothioate
  modified_base 22: mod_base = OTHER; note = 2'-deoxy-2'-fluoroguanosine-3'-phosphorothioate
  modified_base 23: mod_base = OTHER; note = 2'-O-methyladenosine
aacttgagagttgctgggtctga

SEQ ID NO: 1118 - RNA, 23 nt, synthetic construct
  source 1..23: mol_type = other RNA
  modified_base 1: mod_base = OTHER; note = 2'-O-methyluridine-3'-phosphate
  modified_base 2: mod_base = OTHER; note = 2'-deoxy-2'-fluorouridine-3'-phosphate
  modified_base 3: mod_base = OTHER; note = 2'-O-methylguanosine-3'-phosphate
  modified_base 4: mod_base = OTHER; note = 2'-deoxy-2'-fluoroadenosine-3'-phosphate
  modified_base 5: mod_base = OTHER; note = 2'-O-methyladenosine-3'-phosphate
  modified_base 6: mod_base = OTHER; note = 2'-deoxy-2'-fluorouridine-3'-phosphate
  modified_base 7: mod_base = OTHER; note = 2'-O-methyluridine-3'-phosphate
  modified_base 8: mod_base = OTHER; note = 2'-deoxy-2'-fluoroadenosine-3'-phosphate
  modified_base 9: mod_base = OTHER; note = 2'-O-methyladenosine-3'-phosphate
  modified_base 10: mod_base = OTHER; note = 2'-deoxy-2'-fluorouridine-3'-phosphate
  modified_base 11: mod_base = OTHER; note = 2'-O-methylguanosine-3'-phosphate
  modified_base 12: mod_base = OTHER; note = 2'-O-methyluridine-3'-phosphate
  modified_base 13: mod_base = OTHER; note = 2'-O-methylcytidine-3'-phosphate
  modified_base 14: mod_base = OTHER; note = 2'-deoxy-2'-fluorocytidine-3'-phosphate
  modified_base 15: mod_base = OTHER; note = 2'-O-methyladenosine-3'-phosphate
  modified_base 16: mod_base = OTHER; note = 2'-deoxy-2'-fluorouridine-3'-phosphate
  modified_base 17: mod_base = OTHER; note = 2'-O-methylguanosine-3'-phosphate
  modified_base 18: mod_base = OTHER; note = 2'-deoxy-2'-fluoroguanosine-3'-phosphate
  modified_base 19: mod_base = OTHER; note = 2'-O-methyladenosine-3'-phosphate
  modified_base 20: mod_base = OTHER; note = 2'-deoxy-2'-fluorocytidine-3'-phosphate
  modified_base 21: mod_base = OTHER; note = 2'-O-methyluridine-3'-phosphorothioate
  modified_base 22: mod_base = OTHER; note = 2'-deoxy-2'-fluoroadenosine-3'-phosphorothioate
  modified_base 23: mod_base = OTHER; note = 2'-O-methylcytidine
ttgaattaatgtccatggactac

SEQ ID NO: 1119 - RNA, 23 nt, synthetic construct
  source 1..23: mol_type = other RNA
  modified_base 1: mod_base = OTHER; note = 2'-O-methyladenosine-3'-phosphate
  modified_base 2: mod_base = OTHER; note = 2'-deoxy-2'-fluorouridine-3'-phosphate
  modified_base 3: mod_base = OTHER; note = 2'-O-methyluridine-3'-phosphate
  modified_base 4: mod_base = OTHER; note = 2'-deoxy-2'-fluoroguanosine-3'-phosphate
  modified_base 5: mod_base = OTHER; note = 2'-O-methyladenosine-3'-phosphate
  modified_base 6: mod_base = OTHER; note = 2'-deoxy-2'-fluoroadenosine-3'-phosphate
  modified_base 7: mod_base = OTHER; note = 2'-O-methylguanosine-3'-phosphate
  modified_base 8: mod_base = OTHER; note = 2'-deoxy-2'-fluorouridine-3'-phosphate
  modified_base 9: mod_base = OTHER; note = 2'-O-methyluridine-3'-phosphate
  modified_base 10: mod_base = OTHER; note = 2'-deoxy-2'-fluorouridine-3'-phosphate
  modified_base 11: mod_base = OTHER; note = 2'-O-methyluridine-3'-phosphate
  modified_base 12: mod_base = OTHER; note = 2'-O-methylguanosine-3'-phosphate
  modified_base 13: mod_base = OTHER; note = 2'-O-methyluridine-3'-phosphate
  modified_base 14: mod_base = OTHER; note = 2'-deoxy-2'-fluoroguanosine-3'-phosphate
  modified_base 15: mod_base = OTHER; note = 2'-O-methyladenosine-3'-phosphate
  modified_base 16: mod_base = OTHER; note = 2'-deoxy-2'-fluorouridine-3'-phosphate
  modified_base 17: mod_base = OTHER; note = 2'-O-methylcytidine-3'-phosphate
  modified_base 18: mod_base = OTHER; note = 2'-deoxy-2'-fluorocytidine-3'-phosphate
  modified_base 19: mod_base = OTHER; note = 2'-O-methyladenosine-3'-phosphate
  modified_base 20: mod_base = OTHER; note = 2'-deoxy-2'-fluorouridine-3'-phosphate
  modified_base 21: mod_base = OTHER; note = 2'-O-methylcytidine-3'-phosphorothioate
  modified_base 22: mod_base = OTHER; note = 2'-deoxy-2'-fluorouridine-3'-phosphorothioate
  modified_base 23: mod_base = OTHER; note = 2'-O-methyladenosine
attgaagttttgtgatccatcta

SEQ ID NO: 1120 - RNA, 23 nt, synthetic construct
  source 1..23: mol_type = other RNA
  modified_base 1: mod_base = OTHER; note = 2'-O-methyluridine-3'-phosphate
  modified_base 2: mod_base = OTHER; note = 2'-deoxy-2'-fluoroadenosine-3'-phosphate
  modified_base 3: mod_base = OTHER; note = 2'-O-methyluridine-3'-phosphate
  modified_base 4: mod_base = OTHER; note = 2'-deoxy-2'-fluoroguanosine-3'-phosphate
  modified_base 5: mod_base = OTHER; note = 2'-O-methylguanosine-3'-phosphate
  modified_base 6: mod_base = OTHER; note = 2'-deoxy-2'-fluoroadenosine-3'-phosphate
  modified_base 7: mod_base = OTHER; note = 2'-O-methylguanosine-3'-phosphate
  modified_base 8: mod_base = OTHER; note = 2'-deoxy-2'-fluorouridine-3'-phosphate
  modified_base 9: mod_base = OTHER; note = 2'-O-methyladenosine-3'-phosphate
  modified_base 10: mod_base = OTHER; note = 2'-deoxy-2'-fluorouridine-3'-phosphate
  modified_base 11: mod_base = OTHER; note = 2'-O-methyladenosine-3'-phosphate
  modified_base 12: mod_base = OTHER; note = 2'-O-methyluridine-3'-phosphate
  modified_base 13: mod_base = OTHER; note = 2'-O-methylcytidine-3'-phosphate
  modified_base 14: mod_base = OTHER; note = 2'-deoxy-2'-fluorouridine-3'-phosphate
  modified_base 15: mod_base = OTHER; note = 2'-O-methyluridine-3'-phosphate
  modified_base 16: mod_base = OTHER; note = 2'-deoxy-2'-fluorocytidine-3'-phosphate
  modified_base 17: mod_base = OTHER; note = 2'-O-methyluridine-3'-phosphate
  modified_base 18: mod_base = OTHER; note = 2'-deoxy-2'-fluorocytidine-3'-phosphate
  modified_base 19: mod_base = OTHER; note = 2'-O-methyluridine-3'-phosphate
  modified_base 20: mod_base = OTHER; note = 2'-deoxy-2'-fluoroadenosine-3'-phosphate
  modified_base 21: mod_base = OTHER; note = 2'-O-methylguanosine-3'-phosphorothioate
  modified_base 22: mod_base = OTHER; note = 2'-deoxy-2'-fluoroguanosine-3'-phosphorothioate
  modified_base 23: mod_base = OTHER; note = 2'-O-methylcytidine
tatggagtatatcttctctaggc

SEQ ID NO: 1121 - RNA, 23 nt, synthetic construct
  source 1..23: mol_type = other RNA
  modified_base 1: mod_base = OTHER; note = 2'-O-methyladenosine-3'-phosphate
  modified_base 2: mod_base = OTHER; note = 2'-deoxy-2'-fluoroadenosine-3'-phosphate
  modified_base 3: mod_base = OTHER; note = 2'-O-methyluridine-3'-phosphate
  modified_base 4: mod_base = OTHER; note = 2'-deoxy-2'-fluoroadenosine-3'-phosphate
  modified_base 5: mod_base = OTHER; note = 2'-O-methyluridine-3'-phosphate
  modified_base 6: mod_base = OTHER; note = 2'-deoxy-2'-fluoroadenosine-3'-phosphate
  modified_base 7: mod_base = OTHER; note = 2'-O-methyladenosine-3'-phosphate
  modified_base 8: mod_base = OTHER; note = 2'-deoxy-2'-fluorouridine-3'-phosphate
  modified_base 9: mod_base = OTHER; note = 2'-O-methylguanosine-3'-phosphate
  modified_base 10: mod_base = OTHER; note = 2'-deoxy-2'-fluorouridine-3'-phosphate
  modified_base 11: mod_base = OTHER; note = 2'-O-methyluridine-3'-phosphate
  modified_base 12: mod_base = OTHER; note = 2'-O-methyluridine-3'-phosphate
  modified_base 13: mod_base = OTHER; note = 2'-O-methylguanosine-3'-phosphate
  modified_base 14: mod_base = OTHER; note = 2'-deoxy-2'-fluorouridine-3'-phosphate
  modified_base 15: mod_base = OTHER; note = 2'-O-methyluridine-3'-phosphate
  modified_base 16: mod_base = OTHER; note = 2'-deoxy-2'-fluoroguanosine-3'-phosphate
  modified_base 17: mod_base = OTHER; note = 2'-O-methyluridine-3'-phosphate
  modified_base 18: mod_base = OTHER; note = 2'-deoxy-2'-fluorocytidine-3'-phosphate
  modified_base 19: mod_base = OTHER; note = 2'-O-methyluridine-3'-phosphate
  modified_base 20: mod_base = OTHER; note = 2'-deoxy-2'-fluorouridine-3'-phosphate
  modified_base 21: mod_base = OTHER; note = 2'-O-methyluridine-3'-phosphorothioate
  modified_base 22: mod_base = OTHER; note = 2'-deoxy-2'-fluorocytidine-3'-phosphorothioate
  modified_base 23: mod_base = OTHER; note = 2'-O-methylcytidine
aatataatgtttgttgtctttcc

SEQ ID NO: 1122 - RNA, 23 nt, synthetic construct
  source 1..23: mol_type = other RNA
  modified_base 1: mod_base = OTHER; note = 2'-O-methyladenosine-3'-phosphate
  modified_base 2: mod_base = OTHER; note = 2'-deoxy-2'-fluoroadenosine-3'-phosphate
  modified_base 3: mod_base = OTHER; note = 2'-O-methyladenosine-3'-phosphate
  modified_base 4: mod_base = OTHER; note = 2'-deoxy-2'-fluoroadenosine-3'-phosphate
  modified_base 5: mod_base = OTHER; note = 2'-O-methylguanosine-3'-phosphate
  modified_base 6: mod_base = OTHER; note = 2'-deoxy-2'-fluoroadenosine-3'-phosphate
  modified_base 7: mod_base = OTHER; note = 2'-O-methyladenosine-3'-phosphate
  modified_base 8: mod_base = OTHER; note = 2'-deoxy-2'-fluorouridine-3'-phosphate
  modified_base 9: mod_base = OTHER; note = 2'-O-methyladenosine-3'-phosphate
  modified_base 10: mod_base = OTHER; note = 2'-deoxy-2'-fluorouridine-3'-phosphate
  modified_base 11: mod_base = OTHER; note = 2'-O-methyluridine-3'-phosphate
  modified_base 12: mod_base = OTHER; note = 2'-O-methylcytidine-3'-phosphate
  modified_base 13: mod_base = OTHER; note = 2'-O-methyladenosine-3'-phosphate
  modified_base 14: mod_base = OTHER; note = 2'-deoxy-2'-fluoroadenosine-3'-phosphate
  modified_base 15: mod_base = OTHER; note = 2'-O-methyluridine-3'-phosphate
  modified_base 16: mod_base = OTHER; note = 2'-deoxy-2'-fluoroadenosine-3'-phosphate
  modified_base 17: mod_base = OTHER; note = 2'-O-methyluridine-3'-phosphate
  modified_base 18: mod_base = OTHER; note = 2'-deoxy-2'-fluoroadenosine-3'-phosphate
  modified_base 19: mod_base = OTHER; note = 2'-O-methyladenosine-3'-phosphate
  modified_base 20: mod_base = OTHER; note = 2'-deoxy-2'-fluorouridine-3'-phosphate
  modified_base 21: mod_base = OTHER; note = 2'-O-methylguanosine-3'-phosphorothioate
  modified_base 22: mod_base = OTHER; note = 2'-deoxy-2'-fluorouridine-3'-phosphorothioate
  modified_base 23: mod_base = OTHER; note = 2'-O-methyluridine
aaaagaatattcaatataatgtt

SEQ ID NO: 1123 - RNA, 23 nt, synthetic construct
  source 1..23: mol_type = other RNA
  modified_base 1: mod_base = OTHER; note = 2'-O-methyladenosine-3'-phosphate
  modified_base 2: mod_base = OTHER; note = 2'-deoxy-2'-fluoroadenosine-3'-phosphate
  modified_base 3: mod_base = OTHER; note = 2'-O-methyladenosine-3'-phosphate
  modified_base 4: mod_base = OTHER; note = 2'-deoxy-2'-fluorocytidine-3'-phosphate
  modified_base 5: mod_base = OTHER; note = 2'-O-methyluridine-3'-phosphate
  modified_base 6: mod_base = OTHER; note = 2'-deoxy-2'-fluorouridine-3'-phosphate
  modified_base 7: mod_base = OTHER; note = 2'-O-methylguanosine-3'-phosphate
  modified_base 8: mod_base = OTHER; note = 2'-deoxy-2'-fluoroadenosine-3'-phosphate
  modified_base 9: mod_base = OTHER; note = 2'-O-methylguanosine-3'-phosphate
  modified_base 10: mod_base = OTHER; note = 2'-deoxy-2'-fluoroadenosine-3'-phosphate
  modified_base 11: mod_base = OTHER; note = 2'-O-methylguanosine-3'-phosphate
  modified_base 12: mod_base = OTHER; note = 2'-O-methyluridine-3'-phosphate
  modified_base 13: mod_base = OTHER; note = 2'-O-methyluridine-3'-phosphate
  modified_base 14: mod_base = OTHER; note = 2'-deoxy-2'-fluoroguanosine-3'-phosphate
  modified_base 15: mod_base = OTHER; note = 2'-O-methylcytidine-3'-phosphate
  modified_base 16: mod_base = OTHER; note = 2'-deoxy-2'-fluorouridine-3'-phosphate
  modified_base 17: mod_base = OTHER; note = 2'-O-methylguanosine-3'-phosphate
  modified_base 18: mod_base = OTHER; note = 2'-deoxy-2'-fluoroguanosine-3'-phosphate
  modified_base 19: mod_base = OTHER; note = 2'-O-methylguanosine-3'-phosphate
  modified_base 20: mod_base = OTHER; note = 2'-deoxy-2'-fluorouridine-3'-phosphate
  modified_base 21: mod_base = OTHER; note = 2'-O-methylcytidine-3'-phosphorothioate
  modified_base 22: mod_base = OTHER; note = 2'-deoxy-2'-fluorouridine-3'-phosphorothioate
  modified_base 23: mod_base = OTHER; note = 2'-O-methylguanosine
aaacttgagagttgctgggtctg

SEQ ID NO: 1124 - RNA, 23 nt, synthetic construct
  source 1..23: mol_type = other RNA
  modified_base 1: mod_base = OTHER; note = 2'-O-methyluridine-3'-phosphate
  modified_base 2: mod_base = OTHER; note = 2'-deoxy-2'-fluorouridine-3'-phosphate
  modified_base 3: mod_base = OTHER; note = 2'-O-methylcytidine-3'-phosphate
  modified_base 4: mod_base = OTHER; note = 2'-deoxy-2'-fluoroadenosine-3'-phosphate
  modified_base 5: mod_base = OTHER; note = 2'-O-methyluridine-3'-phosphate
  modified_base 6: mod_base = OTHER; note = 2'-deoxy-2'-fluorouridine-3'-phosphate
  modified_base 7: mod_base = OTHER; note = 2'-O-methylguanosine-3'-phosphate
  modified_base 8: mod_base = OTHER; note = 2'-deoxy-2'-fluoroadenosine-3'-phosphate
  modified_base 9: mod_base = OTHER; note = 2'-O-methyladenosine-3'-phosphate
  modified_base 10: mod_base = OTHER; note = 2'-deoxy-2'-fluoroguanosine-3'-phosphate
  modified_base 11: mod_base = OTHER; note = 2'-O-methyluridine-3'-phosphate
  modified_base 12: mod_base = OTHER; note = 2'-O-methyluridine-3'-phosphate
  modified_base 13: mod_base = OTHER; note = 2'-O-methyluridine-3'-phosphate
  modified_base 14: mod_base = OTHER; note = 2'-deoxy-2'-fluorouridine-3'-phosphate
  modified_base 15: mod_base = OTHER; note = 2'-O-methylguanosine-3'-phosphate
  modified_base 16: mod_base = OTHER; note = 2'-deoxy-2'-fluorouridine-3'-phosphate
  modified_base 17: mod_base = OTHER; note = 2'-O-methylguanosine-3'-phosphate
  modified_base 18: mod_base = OTHER; note = 2'-deoxy-2'-fluoroadenosine-3'-phosphate
  modified_base 19: mod_base = OTHER; note = 2'-O-methyluridine-3'-phosphate
  modified_base 20: mod_base = OTHER; note = 2'-deoxy-2'-fluorocytidine-3'-phosphate
  modified_base 21: mod_base = OTHER; note = 2'-O-methylcytidine-3'-phosphorothioate
  modified_base 22: mod_base = OTHER; note = 2'-deoxy-2'-fluoroadenosine-3'-phosphorothioate
  modified_base 23: mod_base = OTHER; note = 2'-O-methyluridine
ttcattgaagttttgtgatccat

SEQ ID NO: 1125 - RNA, 23 nt, synthetic construct
  source 1..23: mol_type = other RNA
  modified_base 1: mod_base = OTHER; note = 2'-O-methyluridine-3'-phosphate
  modified_base 2: mod_base = OTHER; note = 2'-deoxy-2'-fluorouridine-3'-phosphate
  modified_base 3: mod_base = OTHER; note = 2'-O-methylcytidine-3'-phosphate
  modified_base 4: mod_base = OTHER; note = 2'-deoxy-2'-fluoroadenosine-3'-phosphate
  modified_base 5: mod_base = OTHER; note = 2'-O-methylcytidine-3'-phosphate
  modified_base 6: mod_base = OTHER; note = 2'-deoxy-2'-fluorouridine-3'-phosphate
  modified_base 7: mod_base = OTHER; note = 2'-O-methyladenosine-3'-phosphate
  modified_base 8: mod_base = OTHER; note = 2'-deoxy-2'-fluorouridine-3'-phosphate
  modified_base 9: mod_base = OTHER; note = 2'-O-methylguanosine-3'-phosphate
  modified_base 10: mod_base = OTHER; note = 2'-deoxy-2'-fluoroguanosine-3'-phosphate
  modified_base 11: mod_base = OTHER; note = 2'-O-methyladenosine-3'-phosphate
  modified_base 12: mod_base = OTHER; note = 2'-O-methylguanosine-3'-phosphate
  modified_base 13: mod_base = OTHER; note = 2'-O-methyluridine-3'-phosphate
  modified_base 14: mod_base = OTHER; note = 2'-deoxy-2'-fluoroadenosine-3'-phosphate
  modified_base 15: mod_base = OTHER; note = 2'-O-methyluridine-3'-phosphate
  modified_base 16: mod_base = OTHER; note = 2'-deoxy-2'-fluoroadenosine-3'-phosphate
  modified_base 17: mod_base = OTHER; note = 2'-O-methyluridine-3'-phosphate
  modified_base 18: mod_base = OTHER; note = 2'-deoxy-2'-fluorocytidine-3'-phosphate
  modified_base 19: mod_base = OTHER; note = 2'-O-methyluridine-3'-phosphate
  modified_base 20: mod_base = OTHER; note = 2'-deoxy-2'-fluorouridine-3'-phosphate
  modified_base 21: mod_base = OTHER; note = 2'-O-methylcytidine-3'-phosphorothioate
  modified_base 22: mod_base = OTHER; note = 2'-deoxy-2'-fluorouridine-3'-phosphorothioate
  modified_base 23: mod_base = OTHER; note = 2'-O-methylcytidine
ttcactatggagtatatcttctc

SEQ ID NO: 1126 - RNA, 23 nt, synthetic construct
  source 1..23: mol_type = other RNA
  modified_base 1: mod_base = OTHER; note = 2'-O-methyluridine-3'-phosphate
  modified_base 2: mod_base = OTHER; note = 2'-deoxy-2'-fluorouridine-3'-phosphate
  modified_base 3: mod_base = OTHER; note = 2'-O-methylcytidine-3'-phosphate
  modified_base 4: mod_base = OTHER; note = 2'-deoxy-2'-fluoroadenosine-3'-phosphate
  modified_base 5: mod_base = OTHER; note = 2'-O-methyladenosine-3'-phosphate
  modified_base 6: mod_base = OTHER; note = 2'-deoxy-2'-fluorouridine-3'-phosphate
  modified_base 7: mod_base = OTHER; note = 2'-O-methyladenosine-3'-phosphate
  modified_base 8: mod_base = OTHER; note = 2'-deoxy-2'-fluorouridine-3'-phosphate
  modified_base 9: mod_base = OTHER; note = 2'-O-methyladenosine-3'-phosphate
  modified_base 10: mod_base = OTHER; note = 2'-deoxy-2'-fluoroadenosine-3'-phosphate
  modified_base 11: mod_base = OTHER; note = 2'-O-methyluridine-3'-phosphate
  modified_base 12: mod_base = OTHER; note = 2'-O-methylguanosine-3'-phosphate
  modified_base 13: mod_base = OTHER; note = 2'-O-methyluridine-3'-phosphate
  modified_base 14: mod_base = OTHER; note = 2'-deoxy-2'-fluorouridine-3'-phosphate
  modified_base 15: mod_base = OTHER; note = 2'-O-methyluridine-3'-phosphate
  modified_base 16: mod_base = OTHER; note = 2'-deoxy-2'-fluoroguanosine-3'-phosphate
  modified_base 17: mod_base = OTHER; note = 2'-O-methyluridine-3'-phosphate
  modified_base 18: mod_base = OTHER; note = 2'-deoxy-2'-fluorouridine-3'-phosphate
  modified_base 19: mod_base = OTHER; note = 2'-O-methylguanosine-3'-phosphate
  modified_base 20: mod_base = OTHER; note = 2'-deoxy-2'-fluorouridine-3'-phosphate
  modified_base 21: mod_base = OTHER; note = 2'-O-methylcytidine-3'-phosphorothioate
  modified_base 22: mod_base = OTHER; note = 2'-deoxy-2'-fluorouridine-3'-phosphorothioate
  modified_base 23: mod_base = OTHER; note = 2'-O-methyluridine
ttcaatataatgtttgttgtctt

SEQ ID NO: 1127 - RNA, 23 nt, synthetic construct
  source 1..23: mol_type = other RNA
  modified_base 1: mod_base = OTHER; note = 2'-O-methyluridine-3'-phosphate
  modified_base 2: mod_base = OTHER; note = 2'-deoxy-2'-fluoroadenosine-3'-phosphate
  modified_base 3: mod_base = OTHER; note = 2'-O-methylguanosine-3'-phosphate
  modified_base 4: mod_base = OTHER; note = 2'-deoxy-2'-fluorouridine-3'-phosphate
  modified_base 5: mod_base = OTHER; note = 2'-O-methyluridine-3'-phosphate
  modified_base 6: mod_base = OTHER; note = 2'-deoxy-2'-fluoroguanosine-3'-phosphate
  modified_base 7: mod_base = OTHER; note = 2'-O-methylguanosine-3'-phosphate
  modified_base 8: mod_base = OTHER; note = 2'-deoxy-2'-fluorouridine-3'-phosphate
  modified_base 9: mod_base = OTHER; note = 2'-O-methyluridine-3'-phosphate
  modified_base 10: mod_base = OTHER; note = 2'-deoxy-2'-fluorouridine-3'-phosphate
  modified_base 11: mod_base = OTHER; note = 2'-O-methylcytidine-3'-phosphate
  modified_base 12: mod_base = OTHER; note = 2'-O-methylguanosine-3'-phosphate
  modified_base 13: mod_base = OTHER; note = 2'-O-methyluridine-3'-phosphate
  modified_base 14: mod_base = OTHER; note = 2'-deoxy-2'-fluoroguanosine-3'-phosphate
  modified_base 15: mod_base = OTHER; note = 2'-O-methyladenosine-3'-phosphate
  modified_base 16: mod_base = OTHER; note = 2'-deoxy-2'-fluorouridine-3'-phosphate
  modified_base 17: mod_base = OTHER; note = 2'-O-methyluridine-3'-phosphate
  modified_base 18: mod_base = OTHER; note = 2'-deoxy-2'-fluorouridine-3'-phosphate
  modified_base 19: mod_base = OTHER; note = 2'-O-methylcytidine-3'-phosphate
  modified_base 20: mod_base = OTHER; note = 2'-deoxy-2'-fluorocytidine-3'-phosphate
  modified_base 21: mod_base = OTHER; note = 2'-O-methylcytidine-3'-phosphorothioate
  modified_base 22: mod_base = OTHER; note = 2'-deoxy-2'-fluoroadenosine-3'-phosphorothioate
  modified_base 23: mod_base = OTHER; note = 2'-O-methyladenosine
tagttggtttcgtgatttcccaa

SEQ ID NO: 1128 - RNA, 23 nt, synthetic construct
  source 1..23: mol_type = other RNA
  modified_base 1: mod_base = OTHER; note = 2'-O-methyladenosine-3'-phosphate
  modified_base 2: mod_base = OTHER; note = 2'-deoxy-2'-fluoroadenosine-3'-phosphate
  modified_base 3: mod_base = OTHER; note = 2'-O-methyladenosine-3'-phosphate
  modified_base 4: mod_base = OTHER; note = 2'-deoxy-2'-fluoroadenosine-3'-phosphate
  modified_base 5: mod_base = OTHER; note = 2'-O-methylcytidine-3'-phosphate
  modified_base 6: mod_base = OTHER; note = 2'-deoxy-2'-fluorouridine-3'-phosphate
  modified_base 7: mod_base = OTHER; note = 2'-O-methyluridine-3'-phosphate
  modified_base 8: mod_base = OTHER; note = 2'-deoxy-2'-fluoroguanosine-3'-phosphate
  modified_base 9: mod_base = OTHER; note = 2'-O-methyladenosine-3'-phosphate
  modified_base 10: mod_base = OTHER; note = 2'-deoxy-2'-fluoroguanosine-3'-phosphate
  modified_base 11: mod_base = OTHER; note = 2'-O-methyladenosine-3'-phosphate
  modified_base 12: mod_base = OTHER; note = 2'-O-methylguanosine-3'-phosphate
  modified_base 13: mod_base = OTHER; note = 2'-O-methyluridine-3'-phosphate
  modified_base 14: mod_base = OTHER; note = 2'-deoxy-2'-fluorouridine-3'-phosphate
  modified_base 15: mod_base = OTHER; note = 2'-O-methylguanosine-3'-phosphate
  modified_base 16: mod_base = OTHER; note = 2'-deoxy-2'-fluorocytidine-3'-phosphate
  modified_base 17: mod_base = OTHER; note = 2'-O-methyluridine-3'-phosphate
  modified_base 18: mod_base = OTHER; note = 2'-deoxy-2'-fluoroguanosine-3'-phosphate
  modified_base 19: mod_base = OTHER; note = 2'-O-methylguanosine-3'-phosphate
  modified_base 20: mod_base = OTHER; note = 2'-deoxy-2'-fluoroguanosine-3'-phosphate
  modified_base 21: mod_base = OTHER; note = 2'-O-methyluridine-3'-phosphorothioate
  modified_base 22: mod_base = OTHER; note = 2'-deoxy-2'-fluorocytidine-3'-phosphorothioate
  modified_base 23: mod_base = OTHER; note = 2'-O-methyluridine
aaaacttgagagttgctgggtct

SEQ ID NO: 1129 - RNA, 23 nt, synthetic construct
  source 1..23: mol_type = other RNA
  modified_base 1: mod_base = OTHER; note = 2'-O-methyluridine-3'-phosphate
  modified_base 2: mod_base = OTHER; note = 2'-deoxy-2'-fluorouridine-3'-phosphate
  modified_base 3: mod_base = OTHER; note = 2'-O-methylcytidine-3'-phosphate
  modified_base 4: mod_base = OTHER; note = 2'-deoxy-2'-fluoroguanosine-3'-phosphate
  modified_base 5: mod_base = OTHER; note = 2'-O-methyladenosine-3'-phosphate
  modified_base 6: mod_base = OTHER; note = 2'-deoxy-2'-fluorouridine-3'-phosphate
  modified_base 7: mod_base = OTHER; note = 2'-O-methylguanosine-3'-phosphate
  modified_base 8: mod_base = OTHER; note = 2'-deoxy-2'-fluorouridine-3'-phosphate
  modified_base 9: mod_base = OTHER; note = 2'-O-methyluridine-3'-phosphate
  modified_base 10: mod_base = OTHER; note = 2'-deoxy-2'-fluoroguanosine-3'-phosphate
  modified_base 11: mod_base = OTHER; note = 2'-O-methyladenosine-3'-phosphate
  modified_base 12: mod_base = OTHER; note = 2'-O-methyladenosine-3'-phosphate
  modified_base 13: mod_base = OTHER; note = 2'-O-methyluridine-3'-phosphate
  modified_base 14: mod_base = OTHER; note = 2'-deoxy-2'-fluorouridine-3'-phosphate
  modified_base 15: mod_base = OTHER; note = 2'-O-methyladenosine-3'-phosphate
  modified_base 16: mod_base = OTHER; note = 2'-deoxy-2'-fluoroadenosine-3'-phosphate
  modified_base 17: mod_base = OTHER; note = 2'-O-methyluridine-3'-phosphate
  modified_base 18: mod_base = OTHER; note = 2'-deoxy-2'-fluoroguanosine-3'-phosphate
  modified_base 19: mod_base = OTHER; note = 2'-O-methyluridine-3'-phosphate
  modified_base 20: mod_base = OTHER; note = 2'-deoxy-2'-fluorocytidine-3'-phosphate
  modified_base 21: mod_base = OTHER; note = 2'-O-methylcytidine-3'-phosphorothioate
  modified_base 22: mod_base = OTHER; note = 2'-deoxy-2'-fluoroadenosine-3'-phosphorothioate
  modified_base 23: mod_base = OTHER; note = 2'-O-methyluridine
ttcgatgttgaattaatgtccat

SEQ ID NO: 1130 - RNA, 23 nt, synthetic construct
  source 1..23: mol_type = other RNA
  modified_base 1: mod_base = OTHER; note = 2'-O-methyluridine-3'-phosphate
  modified_base 2: mod_base = OTHER; note = 2'-deoxy-2'-fluorouridine-3'-phosphate
  modified_base 3: mod_base = OTHER; note = 2'-O-methyluridine-3'-phosphate
  modified_base 4: mod_base = OTHER; note = 2'-deoxy-2'-fluorocytidine-3'-phosphate
  modified_base 5: mod_base = OTHER; note = 2'-O-methyladenosine-3'-phosphate
  modified_base 6: mod_base = OTHER; note = 2'-deoxy-2'-fluorouridine-3'-phosphate
  modified_base 7: mod_base = OTHER; note = 2'-O-methyluridine-3'-phosphate
  modified_base 8: mod_base = OTHER; note = 2'-deoxy-2'-fluoroguanosine-3'-phosphate
  modified_base 9: mod_base = OTHER; note = 2'-O-methyladenosine-3'-phosphate
  modified_base 10: mod_base = OTHER; note = 2'-deoxy-2'-fluoroadenosine-3'-phosphate
  modified_base 11: mod_base = OTHER; note = 2'-O-methylguanosine-3'-phosphate
  modified_base 12: mod_base = OTHER; note = 2'-O-methyluridine-3'-phosphate
  modified_base 13: mod_base = OTHER; note = 2'-O-methyluridine-3'-phosphate
  modified_base 14: mod_base = OTHER; note = 2'-deoxy-2'-fluorouridine-3'-phosphate
  modified_base 15: mod_base = OTHER; note = 2'-O-methyluridine-3'-phosphate
  modified_base 16: mod_base = OTHER; note = 2'-deoxy-2'-fluoroguanosine-3'-phosphate
  modified_base 17: mod_base = OTHER; note = 2'-O-methyluridine-3'-phosphate
  modified_base 18: mod_base = OTHER; note = 2'-deoxy-2'-fluoroguanosine-3'-phosphate
  modified_base 19: mod_base = OTHER; note = 2'-O-methyladenosine-3'-phosphate
  modified_base 20: mod_base = OTHER; note = 2'-deoxy-2'-fluorouridine-3'-phosphate
  modified_base 21: mod_base = OTHER; note = 2'-O-methylcytidine-3'-phosphorothioate
  modified_base 22: mod_base = OTHER; note = 2'-deoxy-2'-fluorocytidine-3'-phosphorothioate
  modified_base 23: mod_base = OTHER; note = 2'-O-methyladenosine
tttcattgaagttttgtgatcca

SEQ ID NO: 1131 - RNA, 23 nt, synthetic construct
  source 1..23: mol_type = other RNA
  modified_base 1: mod_base = OTHER; note = 2'-O-methyluridine-3'-phosphate
  modified_base 2: mod_base = OTHER; note = 2'-deoxy-2'-fluoroadenosine-3'-phosphate
  modified_base 3: mod_base = OTHER; note = 2'-O-methylguanosine-3'-phosphate
  modified_base 4: mod_base = OTHER; note = 2'-deoxy-2'-fluoroadenosine-3'-phosphate
  modified_base 5: mod_base = OTHER; note = 2'-O-methyluridine-3'-phosphate
  modified_base 6: mod_base = OTHER; note = 2'-deoxy-2'-fluorouridine-3'-phosphate
  modified_base 7: mod_base = OTHER; note = 2'-O-methylguanosine-3'-phosphate
  modified_base 8: mod_base = OTHER; note = 2'-deoxy-2'-fluorocytidine-3'-phosphate
  modified_base 9: mod_base = OTHER; note = 2'-O-methyluridine-3'-phosphate
  modified_base 10: mod_base = OTHER; note = 2'-deoxy-2'-fluorouridine-3'-phosphate
  modified_base 11: mod_base = OTHER; note = 2'-O-methylcytidine-3'-phosphate
  modified_base 12: mod_base = OTHER; note = 2'-O-methyladenosine-3'-phosphate
  modified_base 13: mod_base = OTHER; note = 2'-O-methylcytidine-3'-phosphate
  modified_base 14: mod_base = OTHER; note = 2'-deoxy-2'-fluorouridine-3'-phosphate
  modified_base 15: mod_base = OTHER; note = 2'-O-methyladenosine-3'-phosphate
  modified_base 16: mod_base = OTHER; note = 2'-deoxy-2'-fluorouridine-3'-phosphate
  modified_base 17: mod_base = OTHER; note = 2'-O-methylguanosine-3'-phosphate
  modified_base 18: mod_base = OTHER; note = 2'-deoxy-2'-fluoroguanosine-3'-phosphate
  modified_base 19: mod_base = OTHER; note = 2'-O-methyladenosine-3'-phosphate
  modified_base 20: mod_base = OTHER; note = 2'-deoxy-2'-fluoroguanosine-3'-phosphate
  modified_base 21: mod_base = OTHER; note = 2'-O-methyluridine-3'-phosphorothioate
  modified_base 22: mod_base = OTHER; note = 2'-deoxy-2'-fluoroadenosine-3'-phosphorothioate
  modified_base 23: mod_base = OTHER; note = 2'-O-methyluridine
tagattgcttcactatggagtat

SEQ ID NO: 1132 - RNA, 23 nt, synthetic construct
  source 1..23: mol_type = other RNA
  modified_base 1: mod_base = OTHER; note = 2'-O-methyladenosine-3'-phosphate
  modified_base 2: mod_base = OTHER; note = 2'-deoxy-2'-fluorouridine-3'-phosphate
  modified_base 3: mod_base = OTHER; note = 2'-O-methyluridine-3'-phosphate
  modified_base 4: mod_base = OTHER; note = 2'-deoxy-2'-fluorocytidine-3'-phosphate
  modified_base 5: mod_base = OTHER; note = 2'-O-methyladenosine-3'-phosphate
  modified_base 6: mod_base = OTHER; note = 2'-deoxy-2'-fluoroadenosine-3'-phosphate
  modified_base 7: mod_base = OTHER; note = 2'-O-methyluridine-3'-phosphate
  modified_base 8: mod_base = OTHER; note = 2'-deoxy-2'-fluoroadenosine-3'-phosphate
  modified_base 9: mod_base = OTHER; note = 2'-O-methyluridine-3'-phosphate
  modified_base 10: mod_base = OTHER; note = 2'-deoxy-2'-fluoroadenosine-3'-phosphate
  modified_base 11: mod_base = OTHER; note = 2'-O-methyladenosine-3'-phosphate
  modified_base 12: mod_base = OTHER; note = 2'-O-methyluridine-3'-phosphate
  modified_base 13: mod_base = OTHER; note = 2'-O-methylguanosine-3'-phosphate
  modified_base 14: mod_base = OTHER; note = 2'-deoxy-2'-fluorouridine-3'-phosphate
  modified_base 15: mod_base = OTHER; note = 2'-O-methyluridine-3'-phosphate
  modified_base 16: mod_base = OTHER; note = 2'-deoxy-2'-fluorouridine-3'-phosphate
  modified_base 17: mod_base = OTHER; note = 2'-O-methylguanosine-3'-phosphate
  modified_base 18: mod_base = OTHER; note = 2'-deoxy-2'-fluorouridine-3'-phosphate
  modified_base 19: mod_base = OTHER; note = 2'-O-methyluridine-3'-phosphate
  modified_base 20: mod_base = OTHER; note = 2'-deoxy-2'-fluoroguanosine-3'-phosphate
  modified_base 21: mod_base = OTHER; note = 2'-O-methyluridine-3'-phosphorothioate
  modified_base 22: mod_base = OTHER; note = 2'-deoxy-2'-fluorocytidine-3'-phosphorothioate
  modified_base 23: mod_base = OTHER; note = 2'-O-methyluridine
attcaatataatgtttgttgtct

SEQ ID NO: 1133 - RNA, 23 nt, synthetic construct
  source 1..23: mol_type = other RNA
  modified_base 1: mod_base = OTHER; note = 2'-O-methyladenosine-3'-phosphate
  modified_base 2: mod_base = OTHER; note = 2'-deoxy-2'-fluorouridine-3'-phosphate
  modified_base 3: mod_base = OTHER; note = 2'-O-methyladenosine-3'-phosphate
  modified_base 4: mod_base = OTHER; note = 2'-deoxy-2'-fluoroguanosine-3'-phosphate
  modified_base 5: mod_base = OTHER; note = 2'-O-methyluridine-3'-phosphate
  modified_base 6: mod_base = OTHER; note = 2'-deoxy-2'-fluorouridine-3'-phosphate
  modified_base 7: mod_base = OTHER; note = 2'-O-methylguanosine-3'-phosphate
  modified_base 8: mod_base = OTHER; note = 2'-deoxy-2'-fluoroguanosine-3'-phosphate
  modified_base 9: mod_base = OTHER; note = 2'-O-methyluridine-3'-phosphate
  modified_base 10: mod_base = OTHER; note = 2'-deoxy-2'-fluorouridine-3'-phosphate
  modified_base 11: mod_base = OTHER; note = 2'-O-methyluridine-3'-phosphate
  modified_base 12: mod_base = OTHER; note = 2'-O-methylcytidine-3'-phosphate
  modified_base 13: mod_base = OTHER; note = 2'-O-methylguanosine-3'-phosphate
  modified_base 14: mod_base = OTHER; note = 2'-deoxy-2'-fluorouridine-3'-phosphate
  modified_base 15: mod_base = OTHER; note = 2'-O-methylguanosine-3'-phosphate
  modified_base 16: mod_base = OTHER; note = 2'-deoxy-2'-fluoroadenosine-3'-phosphate
  modified_base 17: mod_base = OTHER; note = 2'-O-methyluridine-3'-phosphate
  modified_base 18: mod_base = OTHER; note = 2'-deoxy-2'-fluorouridine-3'-phosphate
  modified_base 19: mod_base = OTHER; note = 2'-O-methyluridine-3'-phosphate
  modified_base 20: mod_base = OTHER; note = 2'-deoxy-2'-fluorocytidine-3'-phosphate
  modified_base 21: mod_base = OTHER; note = 2'-O-methylcytidine-3'-phosphorothioate
  modified_base 22: mod_base = OTHER; note = 2'-deoxy-2'-fluorocytidine-3'-phosphorothioate
  modified_base 23: mod_base = OTHER; note = 2'-O-methyladenosine
atagttggtttcgtgatttccca

SEQ ID NO: 1134 - RNA, 23 nt, synthetic construct
  source 1..23: mol_type = other RNA
  modified_base 1: mod_base = OTHER; note = 2'-O-methyladenosine-3'-phosphate
  modified_base 2: mod_base = OTHER; note = 2'-deoxy-2'-fluoroadenosine-3'-phosphate
  modified_base 3: mod_base = OTHER; note = 2'-O-methyladenosine-3'-phosphate
  modified_base 4: mod_base = OTHER; note = 2'-deoxy-2'-fluoroadenosine-3'-phosphate
  modified_base 5: mod_base = OTHER; note = 2'-O-methyladenosine-3'-phosphate
  modified_base 6: mod_base = OTHER; note = 2'-deoxy-2'-fluorocytidine-3'-phosphate
  modified_base 7: mod_base = OTHER; note = 2'-O-methyluridine-3'-phosphate
  modified_base 8: mod_base = OTHER; note = 2'-deoxy-2'-fluorouridine-3'-phosphate
  modified_base 9: mod_base = OTHER; note = 2'-O-methylguanosine-3'-phosphate
  modified_base 10: mod_base = OTHER; note = 2'-deoxy-2'-fluoroadenosine-3'-phosphate
  modified_base 11: mod_base = OTHER; note = 2'-O-methylguanosine-3'-phosphate
  modified_base 12: mod_base = OTHER; note = 2'-O-methyladenosine-3'-phosphate
  modified_base 13: mod_base = OTHER; note = 2'-O-methylguanosine-3'-phosphate
  modified_base 14: mod_base = OTHER; note = 2'-deoxy-2'-fluorouridine-3'-phosphate
  modified_base 15: mod_base = OTHER; note = 2'-O-methyluridine-3'-phosphate
  modified_base 16: mod_base = OTHER; note = 2'-deoxy-2'-fluoroguanosine-3'-phosphate
  modified_base 17: mod_base = OTHER; note = 2'-O-methylcytidine-3'-phosphate
  modified_base 18: mod_base = OTHER; note = 2'-deoxy-2'-fluorouridine-3'-phosphate
  modified_base 19: mod_base = OTHER; note = 2'-O-methylguanosine-3'-phosphate
  modified_base 20: mod_base = OTHER; note = 2'-deoxy-2'-fluoroguanosine-3'-phosphate
  modified_base 21: mod_base = OTHER; note = 2'-O-methylguanosine-3'-phosphorothioate
  modified_base 22: mod_base = OTHER; note = 2'-deoxy-2'-fluorouridine-3'-phosphorothioate
  modified_base 23: mod_base = OTHER; note = 2'-O-methylcytidine
aaaaacttgagagttgctgggtc

SEQ ID NO: 1135 - RNA, 23 nt, synthetic construct
  source 1..23: mol_type = other RNA
  modified_base 1: mod_base = OTHER; note = 2'-O-methyladenosine-3'-phosphate
  modified_base 2: mod_base = OTHER; note = 2'-deoxy-2'-fluorouridine-3'-phosphate
  modified_base 3: mod_base = OTHER; note = 2'-O-methyluridine-3'-phosphate
  modified_base 4: mod_base = OTHER; note = 2'-deoxy-2'-fluorocytidine-3'-phosphate
  modified_base 5: mod_base = OTHER; note = 2'-O-methylguanosine-3'-phosphate
  modified_base 6: mod_base = OTHER; note = 2'-deoxy-2'-fluoroadenosine-3'-phosphate
  modified_base 7: mod_base = OTHER; note = 2'-O-methyluridine-3'-phosphate
  modified_base 8: mod_base = OTHER; note = 2'-deoxy-2'-fluoroguanosine-3'-phosphate
  modified_base 9: mod_base = OTHER; note = 2'-O-methyluridine-3'-phosphate
  modified_base 10: mod_base = OTHER; note = 2'-deoxy-2'-fluorouridine-3'-phosphate
  modified_base 11: mod_base = OTHER; note = 2'-O-methylguanosine-3'-phosphate
  modified_base 12: mod_base = OTHER; note = 2'-O-methyladenosine-3'-phosphate
  modified_base 13: mod_base = OTHER; note = 2'-O-methyladenosine-3'-phosphate
  modified_base 14: mod_base = OTHER; note = 2'-deoxy-2'-fluorouridine-3'-phosphate
  modified_base 15: mod_base = OTHER; note = 2'-O-methyluridine-3'-phosphate
  modified_base 16: mod_base = OTHER; note = 2'-deoxy-2'-fluoroadenosine-3'-phosphate
  modified_base 17: mod_base = OTHER; note = 2'-O-methyladenosine-3'-phosphate
  modified_base 18: mod_base = OTHER; note = 2'-deoxy-2'-fluorouridine-3'-phosphate
  modified_base 19: mod_base = OTHER; note = 2'-O-methylguanosine-3'-phosphate
  modified_base 20: mod_base = OTHER; note = 2'-deoxy-2'-fluorouridine-3'-phosphate
  modified_base 21: mod_base = OTHER; note = 2'-O-methylcytidine-3'-phosphorothioate
  modified_base 22: mod_base = OTHER; note = 2'-deoxy-2'-fluorocytidine-3'-phosphorothioate
  modified_base 23: mod_base = OTHER; note = 2'-O-methyladenosine
attcgatgttgaattaatgtcca

SEQ ID NO: 1136 - RNA, 23 nt, synthetic construct
  source 1..23: mol_type = other RNA
  modified_base 1: mod_base = OTHER; note = 2'-O-methyluridine-3'-phosphate
  modified_base 2: mod_base = OTHER; note = 2'-deoxy-2'-fluoroadenosine-3'-phosphate
  modified_base 3: mod_base = OTHER; note = 2'-O-methyluridine-3'-phosphate
  modified_base 4: mod_base = OTHER; note = 2'-deoxy-2'-fluorouridine-3'-phosphate
  modified_base 5: mod_base = OTHER; note = 2'-O-methyluridine-3'-phosphate
  modified_base 6: mod_base = OTHER; note = 2'-deoxy-2'-fluoroguanosine-3'-phosphate
  modified_base 7: mod_base = OTHER; note = 2'-O-methyluridine-3'-phosphate
  modified_base 8: mod_base = OTHER; note = 2'-deoxy-2'-fluoroadenosine-3'-phosphate
  modified_base 9: mod_base = OTHER; note = 2'-O-methylguanosine-3'-phosphate
  modified_base 10: mod_base = OTHER; note = 2'-deoxy-2'-fluorouridine-3'-phosphate
  modified_base 11: mod_base = OTHER; note = 2'-O-methyluridine-3'-phosphate
  modified_base 12: mod_base = OTHER; note = 2'-O-methylcytidine-3'-phosphate
  modified_base 13: mod_base = OTHER; note = 2'-O-methyluridine-3'-phosphate
  modified_base 14: mod_base = OTHER; note = 2'-deoxy-2'-fluorocytidine-3'-phosphate
  modified_base 15: mod_base = OTHER; note = 2'-O-methylcytidine-3'-phosphate
  modified_base 16: mod_base = OTHER; note = 2'-deoxy-2'-fluorocytidine-3'-phosphate
  modified_base 17: mod_base = OTHER; note = 2'-O-methyladenosine-3'-phosphate
  modified_base 18: mod_base = OTHER; note = 2'-deoxy-2'-fluorocytidine-3'-phosphate
  modified_base 19: mod_base = OTHER; note = 2'-O-methylguanosine-3'-phosphate
  modified_base 20: mod_base = OTHER; note = 2'-deoxy-2'-fluorouridine-3'-phosphate
  modified_base 21: mod_base = OTHER; note = 2'-O-methyluridine-3'-phosphorothioate
  modified_base 22: mod_base = OTHER; note = 2'-deoxy-2'-fluorouridine-3'-phosphorothioate
  modified_base 23: mod_base = OTHER; note = 2'-O-methylcytidine
tatttgtagttctcccacgtttc

SEQ ID NO: 1137 - RNA, 23 nt, synthetic construct
  source 1..23: mol_type = other RNA
  modified_base 1: mod_base = OTHER; note = 2'-O-methyluridine-3'-phosphate
  modified_base 2: mod_base = OTHER; note = 2'-deoxy-2'-fluorouridine-3'-phosphate
  modified_base 3: mod_base = OTHER; note = 2'-O-methyladenosine-3'-phosphate
  modified_base 4: mod_base = OTHER; note = 2'-deoxy-2'-fluoroguanosine-3'-phosphate
  modified_base 5: mod_base = OTHER; note = 2'-O-methyladenosine-3'-phosphate
  modified_base 6: mod_base = OTHER; note = 2'-deoxy-2'-fluorouridine-3'-phosphate
  modified_base 7: mod_base = OTHER; note = 2'-O-methyluridine-3'-phosphate
  modified_base 8: mod_base = OTHER; note = 2'-deoxy-2'-fluoroguanosine-3'-phosphate
  modified_base 9: mod_base = OTHER; note = 2'-O-methylcytidine-3'-phosphate
  modified_base 10: mod_base = OTHER; note = 2'-deoxy-2'-fluorouridine-3'-phosphate
  modified_base 11: mod_base = OTHER; note = 2'-O-methyluridine-3'-phosphate
  modified_base 12: mod_base = OTHER; note = 2'-O-methylcytidine-3'-phosphate
  modified_base 13: mod_base = OTHER; note = 2'-O-methyladenosine-3'-phosphate
  modified_base 14: mod_base = OTHER; note = 2'-deoxy-2'-fluorocytidine-3'-phosphate
  modified_base 15: mod_base = OTHER; note = 2'-O-methyluridine-3'-phosphate
  modified_base 16: mod_base = OTHER; note = 2'-deoxy-2'-fluoroadenosine-3'-phosphate
  modified_base 17: mod_base = OTHER; note = 2'-O-methyluridine-3'-phosphate
  modified_base 18: mod_base = OTHER; note = 2'-deoxy-2'-fluoroguanosine-3'-phosphate
  modified_base 19: mod_base = OTHER; note = 2'-O-methylguanosine-3'-phosphate
  modified_base 20: mod_base = OTHER; note = 2'-deoxy-2'-fluoroadenosine-3'-phosphate
  modified_base 21: mod_base = OTHER; note = 2'-O-methylguanosine-3'-phosphorothioate
  modified_base 22: mod_base = OTHER; note = 2'-deoxy-2'-fluorouridine-3'-phosphorothioate
  modified_base 23: mod_base = OTHER; note = 2'-O-methyladenosine
ttagattgcttcactatggagta

SEQ ID NO: 1138 - RNA, 23 nt, synthetic construct
  source 1..23: mol_type = other RNA
  modified_base 1: mod_base = OTHER; note = 2'-O-methyluridine-3'-phosphate
  modified_base 2: mod_base = OTHER; note = 2'-deoxy-2'-fluoroadenosine-3'-phosphate
  modified_base 3: mod_base = OTHER; note = 2'-O-methyluridine-3'-phosphate
  modified_base 4: mod_base = OTHER; note = 2'-deoxy-2'-fluorouridine-3'-phosphate
  modified_base 5: mod_base = OTHER; note = 2'-O-methylcytidine-3'-phosphate
  modified_base 6: mod_base = OTHER; note = 2'-deoxy-2'-fluoroadenosine-3'-phosphate
  modified_base 7: mod_base = OTHER; note = 2'-O-methyladenosine-3'-phosphate
  modified_base 8: mod_base = OTHER; note = 2'-deoxy-2'-fluorouridine-3'-phosphate
  modified_base 9: mod_base = OTHER; note = 2'-O-methyladenosine-3'-phosphate
  modified_base 10: mod_base = OTHER; note = 2'-deoxy-2'-fluorouridine-3'-phosphate
  modified_base 11: mod_base = OTHER; note = 2'-O-methyladenosine-3'-phosphate
  modified_base 12: mod_base = OTHER; note = 2'-O-methyladenosine-3'-phosphate
  modified_base 13: mod_base = OTHER; note = 2'-O-methyluridine-3'-phosphate
  modified_base 14: mod_base = OTHER; note = 2'-deoxy-2'-fluoroguanosine-3'-phosphate
  modified_base 15: mod_base = OTHER; note = 2'-O-methyluridine-3'-phosphate
  modified_base 16: mod_base = OTHER; note = 2'-deoxy-2'-fluorouridine-3'-phosphate
  modified_base 17: mod_base = OTHER; note = 2'-O-methyluridine-3'-phosphate
  modified_base 18: mod_base = OTHER; note = 2'-deoxy-2'-fluoroguanosine-3'-phosphate
  modified_base 19: mod_base = OTHER; note = 2'-O-methyluridine-3'-phosphate
  modified_base 20: mod_base = OTHER; note = 2'-deoxy-2'-fluorouridine-3'-phosphate
  modified_base 21: mod_base = OTHER; note = 2'-O-methylguanosine-3'-phosphorothioate
  modified_base 22: mod_base = OTHER; note = 2'-deoxy-2'-fluorouridine-3'-phosphorothioate
  modified_base 23: mod_base = OTHER; note = 2'-O-methylcytidine
tattcaatataatgtttgttgtc

SEQ ID NO: 1139 - RNA, 23 nt, synthetic construct
  source 1..23: mol_type = other RNA
  modified_base 1: mod_base = OTHER; note = 2'-O-methyluridine-3'-phosphate
  modified_base 2: mod_base = OTHER; note = 2'-deoxy-2'-fluoroadenosine-3'-phosphate
  modified_base 3: mod_base = OTHER; note = 2'-O-methyluridine-3'-phosphate
  modified_base 4: mod_base = OTHER; note = 2'-deoxy-2'-fluoroadenosine-3'-phosphate
  modified_base 5: mod_base = OTHER; note = 2'-O-methylguanosine-3'-phosphate
  modified_base 6: mod_base = OTHER; note = 2'-deoxy-2'-fluorouridine-3'-phosphate
  modified_base 7: mod_base = OTHER; note = 2'-O-methyluridine-3'-phosphate
  modified_base 8: mod_base = OTHER; note = 2'-deoxy-2'-fluoroguanosine-3'-phosphate
  modified_base 9: mod_base = OTHER; note = 2'-O-methylguanosine-3'-phosphate
  modified_base 10: mod_base = OTHER; note = 2'-deoxy-2'-fluorouridine-3'-phosphate
  modified_base 11: mod_base = OTHER; note = 2'-O-methyluridine-3'-phosphate
  modified_base 12: mod_base = OTHER; note = 2'-O-methyluridine-3'-phosphate
  modified_base 13: mod_base = OTHER; note = 2'-O-methylcytidine-3'-phosphate
  modified_base 14: mod_base = OTHER; note = 2'-deoxy-2'-fluoroguanosine-3'-phosphate
  modified_base 15: mod_base = OTHER; note = 2'-O-methyluridine-3'-phosphate
  modified_base 16: mod_base = OTHER; note = 2'-deoxy-2'-fluoroguanosine-3'-phosphate
  modified_base 17: mod_base = OTHER; note = 2'-O-methyladenosine-3'-phosphate
  modified_base 18: mod_base = OTHER; note = 2'-deoxy-2'-fluorouridine-3'-phosphate
  modified_base 19: mod_base = OTHER; note = 2'-O-methyluridine-3'-phosphate
  modified_base 20: mod_base = OTHER; note = 2'-deoxy-2'-fluorouridine-3'-phosphate
  modified_base 21: mod_base = OTHER; note = 2'-O-methylcytidine-3'-phosphorothioate
  modified_base 22: mod_base = OTHER; note = 2'-deoxy-2'-fluorocytidine-3'-phosphorothioate
  modified_base 23: mod_base = OTHER; note = 2'-O-methylcytidine
tatagttggtttcgtgatttccc

SEQ ID NO: 1140 - RNA, 23 nt, synthetic construct
  source 1..23: mol_type = other RNA
  modified_base 1: mod_base = OTHER; note = 2'-O-methyluridine-3'-phosphate
  modified_base 2: mod_base = OTHER; note = 2'-deoxy-2'-fluoroadenosine-3'-phosphate
  modified_base 3: mod_base = OTHER; note = 2'-O-methylguanosine-3'-phosphate
  modified_base 4: mod_base = OTHER; note = 2'-deoxy-2'-fluoroadenosine-3'-phosphate
  modified_base 5: mod_base = OTHER; note = 2'-O-methylcytidine-3'-phosphate
  modified_base 6: mod_base = OTHER; note = 2'-deoxy-2'-fluoroadenosine-3'-phosphate
  modified_base 7: mod_base = OTHER; note = 2'-O-methyluridine-3'-phosphate
  modified_base 8: mod_base = OTHER; note = 2'-deoxy-2'-fluoroguanosine-3'-phosphate
  modified_base 9: mod_base = OTHER; note = 2'-O-methyladenosine-3'-phosphate
  modified_base 10: mod_base = OTHER; note = 2'-deoxy-2'-fluoroadenosine-3'-phosphate
  modified_base 11: mod_base = OTHER; note = 2'-O-methyladenosine-3'-phosphate
  modified_base 12: mod_base = OTHER; note = 2'-O-methyladenosine-3'-phosphate
  modified_base 13: mod_base = OTHER; note = 2'-O-methyladenosine-3'-phosphate
  modified_base 14: mod_base = OTHER; note = 2'-deoxy-2'-fluorocytidine-3'-phosphate
  modified_base 15: mod_base = OTHER; note = 2'-O-methyluridine-3'-phosphate
  modified_base 16: mod_base = OTHER; note = 2'-deoxy-2'-fluorouridine-3'-phosphate
  modified_base 17: mod_base = OTHER; note = 2'-O-methylguanosine-3'-phosphate
  modified_base 18: mod_base = OTHER; note = 2'-deoxy-2'-fluoroadenosine-3'-phosphate
  modified_base 19: mod_base = OTHER; note = 2'-O-methylguanosine-3'-phosphate
  modified_base 20: mod_base = OTHER; note = 2'-deoxy-2'-fluoroadenosine-3'-phosphate
  modified_base 21: mod_base = OTHER; note = 2'-O-methylguanosine-3'-phosphorothioate
  modified_base 22: mod_base = OTHER; note = 2'-deoxy-2'-fluorouridine-3'-phosphorothioate
  modified_base 23: mod_base = OTHER; note = 2'-O-methyluridine
tagacatgaaaaacttgagagtt

SEQ ID NO: 1141 - RNA, 23 nt, synthetic construct
  source 1..23: mol_type = other RNA
  modified_base 1: mod_base = OTHER; note = 2'-O-methyluridine-3'-phosphate
  modified_base 2: mod_base = OTHER; note = 2'-deoxy-2'-fluoroadenosine-3'-phosphate
  modified_base 3: mod_base = OTHER; note = 2'-O-methyluridine-3'-phosphate
  modified_base 4: mod_base = OTHER; note = 2'-deoxy-2'-fluorouridine-3'-phosphate
  modified_base 5: mod_base = OTHER; note = 2'-O-methylcytidine-3'-phosphate
  modified_base 6: mod_base = OTHER; note = 2'-deoxy-2'-fluoroguanosine-3'-phosphate
  modified_base 7: mod_base = OTHER; note = 2'-O-methyladenosine-3'-phosphate
  modified_base 8: mod_base = OTHER; note = 2'-deoxy-2'-fluorouridine-3'-phosphate
  modified_base 9: mod_base = OTHER; note = 2'-O-methylguanosine-3'-phosphate
  modified_base 10: mod_base = OTHER; note = 2'-deoxy-2'-fluorouridine-3'-phosphate
  modified_base 11: mod_base = OTHER; note = 2'-O-methyluridine-3'-phosphate
  modified_base 12: mod_base = OTHER; note = 2'-O-methylguanosine-3'-phosphate
  modified_base 13: mod_base = OTHER; note = 2'-O-methyladenosine-3'-phosphate
  modified_base 14: mod_base = OTHER; note = 2'-deoxy-2'-fluoroadenosine-3'-phosphate
  modified_base 15: mod_base = OTHER; note = 2'-O-methyluridine-3'-phosphate
  modified_base 16: mod_base = OTHER; note = 2'-deoxy-2'-fluorouridine-3'-phosphate
  modified_base 17: mod_base = OTHER; note = 2'-O-methyladenosine-3'-phosphate
  modified_base 18: mod_base = OTHER; note = 2'-deoxy-2'-fluoroadenosine-3'-phosphate
  modified_base 19: mod_base = OTHER; note = 2'-O-methyluridine-3'-phosphate
  modified_base 20: mod_base = OTHER; note = 2'-deoxy-2'-fluoroguanosine-3'-phosphate
  modified_base 21: mod_base = OTHER; note = 2'-O-methyluridine-3'-phosphorothioate
  modified_base 22: mod_base = OTHER; note = 2'-deoxy-2'-fluorocytidine-3'-phosphorothioate
  modified_base 23: mod_base = OTHER; note = 2'-O-methylcytidine
tattcgatgttgaattaatgtcc

SEQ ID NO: 1142 - RNA, 23 nt, synthetic construct
  source 1..23: mol_type = other RNA
  modified_base 1: mod_base = OTHER; note = 2'-O-methyladenosine-3'-phosphate
  modified_base 2: mod_base = OTHER; note = 2'-deoxy-2'-fluoroadenosine-3'-phosphate
  modified_base 3: mod_base = OTHER; note = 2'-O-methylcytidine-3'-phosphate
  modified_base 4: mod_base = OTHER; note = 2'-deoxy-2'-fluorocytidine-3'-phosphate
  modified_base 5: mod_base = OTHER; note = 2'-O-methyladenosine-3'-phosphate
  modified_base 6: mod_base = OTHER; note = 2'-deoxy-2'-fluorouridine-3'-phosphate
  modified_base 7: mod_base = OTHER; note = 2'-O-methyladenosine-3'-phosphate
  modified_base 8: mod_base = OTHER; note = 2'-deoxy-2'-fluorouridine-3'-phosphate
  modified_base 9: mod_base = OTHER; note = 2'-O-methyluridine-3'-phosphate
  modified_base 10: mod_base = OTHER; note = 2'-deoxy-2'-fluorouridine-3'-phosphate
  modified_base 11: mod_base = OTHER; note = 2'-O-methylguanosine-3'-phosphate
  modified_base 12: mod_base = OTHER; note = 2'-O-methyluridine-3'-phosphate
  modified_base 13: mod_base = OTHER; note = 2'-O-methyladenosine-3'-phosphate
  modified_base 14: mod_base = OTHER; note = 2'-deoxy-2'-fluoroguanosine-3'-phosphate
  modified_base 15: mod_base = OTHER; note = 2'-O-methyluridine-3'-phosphate
  modified_base 16: mod_base = OTHER; note = 2'-deoxy-2'-fluorouridine-3'-phosphate
  modified_base 17: mod_base = OTHER; note = 2'-O-methylcytidine-3'-phosphate
  modified_base 18: mod_base = OTHER; note = 2'-deoxy-2'-fluorouridine-3'-phosphate
  modified_base 19: mod_base = OTHER; note = 2'-O-methylcytidine-3'-phosphate
  modified_base 20: mod_base = OTHER; note = 2'-deoxy-2'-fluorocytidine-3'-phosphate
  modified_base 21: mod_base = OTHER; note = 2'-O-methylcytidine-3'-phosphorothioate
  modified_base 22: mod_base = OTHER; note = 2'-deoxy-2'-fluoroadenosine-3'-phosphorothioate
  modified_base 23: mod_base = OTHER; note = 2'-O-methylcytidine
aaccatatttgtagttctcccac

SEQ ID NO: 1143 - RNA, 23 nt, synthetic construct
  source 1..23: mol_type = other RNA
  modified_base 1: mod_base = OTHER; note = 2'-O-methyladenosine-3'-phosphate
  modified_base 2: mod_base = OTHER; note = 2'-deoxy-2'-fluorouridine-3'-phosphate
  modified_base 3: mod_base = OTHER; note = 2'-O-methyluridine-3'-phosphate
  modified_base 4: mod_base = OTHER; note = 2'-deoxy-2'-fluoroadenosine-3'-phosphate
  modified_base 5: mod_base = OTHER; note = 2'-O-methylguanosine-3'-phosphate
  modified_base 6: mod_base = OTHER; note = 2'-deoxy-2'-fluoroadenosine-3'-phosphate
  modified_base 7: mod_base = OTHER; note = 2'-O-methyluridine-3'-phosphate
  modified_base 8: mod_base = OTHER; note = 2'-deoxy-2'-fluorouridine-3'-phosphate
  modified_base 9: mod_base = OTHER; note = 2'-O-methylguanosine-3'-phosphate
  modified_base 10: mod_base = OTHER; note = 2'-deoxy-2'-fluorocytidine-3'-phosphate
  modified_base 11: mod_base = OTHER; note = 2'-O-methyluridine-3'-phosphate
  modified_base 12: mod_base = OTHER; note = 2'-O-methyluridine-3'-phosphate
  modified_base 13: mod_base = OTHER; note = 2'-O-methylcytidine-3'-phosphate
  modified_base 14: mod_base = OTHER; note = 2'-deoxy-2'-fluoroadenosine-3'-phosphate
  modified_base 15: mod_base = OTHER; note = 2'-O-methylcytidine-3'-phosphate
  modified_base 16: mod_base = OTHER; note = 2'-deoxy-2'-fluorouridine-3'-phosphate
  modified_base 17: mod_base = OTHER; note = 2'-O-methyladenosine-3'-phosphate
  modified_base 18: mod_base = OTHER; note = 2'-deoxy-2'-fluorouridine-3'-phosphate
  modified_base 19: mod_base = OTHER; note = 2'-O-methylguanosine-3'-phosphate
  modified_base 20: mod_base = OTHER; note = 2'-deoxy-2'-fluoroguanosine-3'-phosphate
  modified_base 21: mod_base = OTHER; note = 2'-O-methyladenosine-3'-phosphorothioate
  modified_base 22: mod_base = OTHER; note = 2'-deoxy-2'-fluoroguanosine-3'-phosphorothioate
  modified_base 23: mod_base = OTHER; note = 2'-O-methyluridine
attagattgcttcactatggagt

SEQ ID NO: 1144 - RNA, 23 nt, synthetic construct
  source 1..23: mol_type = other RNA
  modified_base 1: mod_base = OTHER; note = 2'-O-methyladenosine-3'-phosphate
  modified_base 2: mod_base = OTHER; note = 2'-deoxy-2'-fluorouridine-3'-phosphate
  modified_base 3: mod_base = OTHER; note = 2'-O-methyladenosine-3'-phosphate
  modified_base 4: mod_base = OTHER; note = 2'-deoxy-2'-fluorouridine-3'-phosphate
  modified_base 5: mod_base = OTHER; note = 2'-O-methyluridine-3'-phosphate
  modified_base 6: mod_base = OTHER; note = 2'-deoxy-2'-fluorocytidine-3'-phosphate
  modified_base 7: mod_base = OTHER; note = 2'-O-methyladenosine-3'-phosphate
  modified_base 8: mod_base = OTHER; note = 2'-deoxy-2'-fluoroadenosine-3'-phosphate
  modified_base 9: mod_base = OTHER; note = 2'-O-methyluridine-3'-phosphate
  modified_base 10: mod_base = OTHER; note = 2'-deoxy-2'-fluoroadenosine-3'-phosphate
  modified_base 11: mod_base = OTHER; note = 2'-O-methyluridine-3'-phosphate
  modified_base 12: mod_base = OTHER; note = 2'-O-methyladenosine-3'-phosphate
  modified_base 13: mod_base = OTHER; note = 2'-O-methyladenosine-3'-phosphate
  modified_base 14: mod_base = OTHER; note = 2'-deoxy-2'-fluorouridine-3'-phosphate
  modified_base 15: mod_base = OTHER; note = 2'-O-methylguanosine-3'-phosphate
  modified_base 16: mod_base = OTHER; note = 2'-deoxy-2'-fluorouridine-3'-phosphate
  modified_base 17: mod_base = OTHER; note = 2'-O-methyluridine-3'-phosphate
  modified_base 18: mod_base = OTHER; note = 2'-deoxy-2'-fluorouridine-3'-phosphate
  modified_base 19: mod_base = OTHER; note = 2'-O-methylguanosine-3'-phosphate
  modified_base 20: mod_base = OTHER; note = 2'-deoxy-2'-fluorouridine-3'-phosphate
  modified_base 21: mod_base = OTHER; note = 2'-O-methyluridine-3'-phosphorothioate
  modified_base 22: mod_base = OTHER; note = 2'-deoxy-2'-fluoroguanosine-3'-phosphorothioate
  modified_base 23: mod_base = OTHER; note = 2'-O-methyluridine
atattcaatataatgtttgttgt

SEQ ID NO: 1145 - RNA, 23 nt, synthetic construct
  source 1..23: mol_type = other RNA
  modified_base 1: mod_base = OTHER; note = 2'-O-methyladenosine-3'-phosphate
  modified_base 2: mod_base = OTHER; note = 2'-deoxy-2'-fluorouridine-3'-phosphate
  modified_base 3: mod_base = OTHER; note = 2'-O-methyluridine-3'-phosphate
  modified_base 4: mod_base = OTHER; note = 2'-deoxy-2'-fluoroguanosine-3'-phosphate
  modified_base 5: mod_base = OTHER; note = 2'-O-methylcytidine-3'-phosphate
  modified_base 6: mod_base = OTHER; note = 2'-deoxy-2'-fluoroadenosine-3'-phosphate
  modified_base 7: mod_base = OTHER; note = 2'-O-methyluridine-3'-phosphate
  modified_base 8: mod_base = OTHER; note = 2'-deoxy-2'-fluorouridine-3'-phosphate
  modified_base 9: mod_base = OTHER; note = 2'-O-methylguanosine-3'-phosphate
  modified_base 10: mod_base = OTHER; note = 2'-deoxy-2'-fluoroguanosine-3'-phosphate
  modified_base 11: mod_base = OTHER; note = 2'-O-methylguanosine-3'-phosphate
  modified_base 12: mod_base = OTHER; note = 2'-O-methylguanosine-3'-phosphate
  modified_base 13: mod_base = OTHER; note = 2'-O-methyladenosine-3'-phosphate
  modified_base 14: mod_base = OTHER; note = 2'-deoxy-2'-fluorocytidine-3'-phosphate
  modified_base 15: mod_base = OTHER; note = 2'-O-methyladenosine-3'-phosphate
  modified_base 16: mod_base = OTHER; note = 2'-deoxy-2'-fluorouridine-3'-phosphate
  modified_base 17: mod_base = OTHER; note = 2'-O-methyluridine-3'-phosphate
  modified_base 18: mod_base = OTHER; note = 2'-deoxy-2'-fluoroguanosine-3'-phosphate
  modified_base 19: mod_base = OTHER; note = 2'-O-methylcytidine-3'-phosphate
  modified_base 20: mod_base = OTHER; note = 2'-deoxy-2'-fluorocytidine-3'-phosphate
  modified_base 21: mod_base = OTHER; note = 2'-O-methyladenosine-3'-phosphorothioate
  modified_base 22: mod_base = OTHER; note = 2'-deoxy-2'-fluoroguanosine-3'-phosphorothioate
  modified_base 23: mod_base = OTHER; note = 2'-O-methyluridine
attgcattggggacattgccagt

SEQ ID NO: 1146 - RNA, 23 nt, synthetic construct
  source 1..23: mol_type = other RNA
  modified_base 1: mod_base = OTHER; note = 2'-O-methyluridine-3'-phosphate
  modified_base 2: mod_base = OTHER; note = 2'-deoxy-2'-fluoroadenosine-3'-phosphate
  modified_base 3: mod_base = OTHER; note = 2'-O-methyladenosine-3'-phosphate
  modified_base 4: mod_base = OTHER; note = 2'-deoxy-2'-fluorouridine-3'-phosphate
  modified_base 5: mod_base = OTHER; note = 2'-O-methylguanosine-3'-phosphate
  modified_base 6: mod_base = OTHER; note = 2'-deoxy-2'-fluorouridine-3'-phosphate
  modified_base 7: mod_base = OTHER; note = 2'-O-methylcytidine-3'-phosphate
  modified_base 8: mod_base = OTHER; note = 2'-deoxy-2'-fluorocytidine-3'-phosphate
  modified_base 9: mod_base = OTHER; note = 2'-O-methyladenosine-3'-phosphate
  modified_base 10: mod_base = OTHER; note = 2'-deoxy-2'-fluorouridine-3'-phosphate
  modified_base 11: mod_base = OTHER; note = 2'-O-methylguanosine-3'-phosphate
  modified_base 12: mod_base = OTHER; note = 2'-O-methylguanosine-3'-phosphate
  modified_base 13: mod_base = OTHER; note = 2'-O-methyladenosine-3'-phosphate
  modified_base 14: mod_base = OTHER; note = 2'-deoxy-2'-fluorocytidine-3'-phosphate
  modified_base 15: mod_base = OTHER; note = 2'-O-methyluridine-3'-phosphate
  modified_base 16: mod_base = OTHER; note = 2'-deoxy-2'-fluoroadenosine-3'-phosphate
  modified_base 17: mod_base = OTHER; note = 2'-O-methylcytidine-3'-phosphate
  modified_base 18: mod_base = OTHER; note = 2'-deoxy-2'-fluorocytidine-3'-phosphate
  modified_base 19: mod_base = OTHER; note = 2'-O-methyluridine-3'-phosphate
  modified_base 20: mod_base = OTHER; note = 2'-deoxy-2'-fluoroguanosine-3'-phosphate
  modified_base 21: mod_base = OTHER; note = 2'-O-methyladenosine-3'-phosphorothioate
  modified_base 22: mod_base = OTHER; note = 2'-deoxy-2'-fluorouridine-3'-phosphorothioate
  modified_base 23: mod_base = OTHER; note = 2'-O-methyladenosine
taatgtccatggactacctgata

SEQ ID NO: 1147 - RNA, 23 nt, synthetic construct
  source 1..23: mol_type = other RNA
  modified_base 1: mod_base = OTHER; note = 2'-O-methyladenosine-3'-phosphate
  modified_base 2: mod_base = OTHER; note = 2'-deoxy-2'-fluorouridine-3'-phosphate
  modified_base 3: mod_base = OTHER; note = 2'-O-methylcytidine-3'-phosphate
  modified_base 4: mod_base = OTHER; note = 2'-deoxy-2'-fluorouridine-3'-phosphate
  modified_base 5: mod_base = OTHER; note = 2'-O-methyladenosine-3'-phosphate
  modified_base 6: mod_base = OTHER; note = 2'-deoxy-2'-fluorouridine-3'-phosphate
  modified_base 7: mod_base = OTHER; note = 2'-O-methyluridine-3'-phosphate
  modified_base 8: mod_base = OTHER; note = 2'-deoxy-2'-fluorocytidine-3'-phosphate
  modified_base 9: mod_base = OTHER; note = 2'-O-methylguanosine-3'-phosphate
  modified_base 10: mod_base = OTHER; note = 2'-deoxy-2'-fluoroadenosine-3'-phosphate
  modified_base 11: mod_base = OTHER; note = 2'-O-methyluridine-3'-phosphate
  modified_base 12: mod_base = OTHER; note = 2'-O-methylguanosine-3'-phosphate
  modified_base 13: mod_base = OTHER; note = 2'-O-methyluridine-3'-phosphate
  modified_base 14: mod_base = OTHER; note = 2'-deoxy-2'-fluorouridine-3'-phosphate
  modified_base 15: mod_base = OTHER; note = 2'-O-methylguanosine-3'-phosphate
  modified_base 16: mod_base = OTHER; note = 2'-deoxy-2'-fluoroadenosine-3'-phosphate
  modified_base 17: mod_base = OTHER; note = 2'-O-methyladenosine-3'-phosphate
  modified_base 18: mod_base = OTHER; note = 2'-deoxy-2'-fluorouridine-3'-phosphate
  modified_base 19: mod_base = OTHER; note = 2'-O-methyluridine-3'-phosphate
  modified_base 20: mod_base = OTHER; note = 2'-deoxy-2'-fluoroadenosine-3'-phosphate
  modified_base 21: mod_base = OTHER; note = 2'-O-methyladenosine-3'-phosphorothioate
  modified_base 22: mod_base = OTHER; note = 2'-deoxy-2'-fluorouridine-3'-phosphorothioate
  modified_base 23: mod_base = OTHER; note = 2'-O-methylguanosine
atctattcgatgttgaattaatg

SEQ ID NO: 1148 - RNA, 23 nt, synthetic construct
  source 1..23: mol_type = other RNA
  modified_base 1: mod_base = OTHER; note = 2'-O-methyladenosine-3'-phosphate
  modified_base 2: mod_base = OTHER; note = 2'-deoxy-2'-fluoroadenosine-3'-phosphate
  modified_base 3: mod_base = OTHER; note = 2'-O-methyladenosine-3'-phosphate
  modified_base 4: mod_base = OTHER; note = 2'-deoxy-2'-fluorocytidine-3'-phosphate
  modified_base 5: mod_base = OTHER; note = 2'-O-methylcytidine-3'-phosphate
  modified_base 6: mod_base = OTHER; note = 2'-deoxy-2'-fluoroadenosine-3'-phosphate
  modified_base 7: mod_base = OTHER; note = 2'-O-methyluridine-3'-phosphate
  modified_base 8: mod_base = OTHER; note = 2'-deoxy-2'-fluoroadenosine-3'-phosphate
  modified_base 9: mod_base = OTHER; note = 2'-O-methyluridine-3'-phosphate
  modified_base 10: mod_base = OTHER; note = 2'-deoxy-2'-fluorouridine-3'-phosphate
  modified_base 11: mod_base = OTHER; note = 2'-O-methyluridine-3'-phosphate
  modified_base 12: mod_base = OTHER; note = 2'-O-methylguanosine-3'-phosphate
  modified_base 13: mod_base = OTHER; note = 2'-O-methyluridine-3'-phosphate
  modified_base 14: mod_base = OTHER; note = 2'-deoxy-2'-fluoroadenosine-3'-phosphate
  modified_base 15: mod_base = OTHER; note = 2'-O-methylguanosine-3'-phosphate
  modified_base 16: mod_base = OTHER; note = 2'-deoxy-2'-fluorouridine-3'-phosphate
  modified_base 17: mod_base = OTHER; note = 2'-O-methyluridine-3'-phosphate
  modified_base 18: mod_base = OTHER; note = 2'-deoxy-2'-fluorocytidine-3'-phosphate
  modified_base 19: mod_base = OTHER; note = 2'-O-methyluridine-3'-phosphate
  modified_base 20: mod_base = OTHER; note = 2'-deoxy-2'-fluorocytidine-3'-phosphate
  modified_base 21: mod_base = OTHER; note = 2'-O-methylcytidine-3'-phosphorothioate
  modified_base 22: mod_base = OTHER; note = 2'-deoxy-2'-fluorocytidine-3'-phosphorothioate
  modified_base 23: mod_base = OTHER; note = 2'-O-methyladenosine
aaaccatatttgtagttctccca

SEQ ID NO: 1149 - RNA, 23 nt, synthetic construct
  source 1..23: mol_type = other RNA
  modified_base 1: mod_base = OTHER; note = 2'-O-methyladenosine-3'-phosphate
  modified_base 2: mod_base = OTHER; note = 2'-deoxy-2'-fluoroadenosine-3'-phosphate
  modified_base 3: mod_base = OTHER; note = 2'-O-methyluridine-3'-phosphate
  modified_base 4: mod_base = OTHER; note = 2'-deoxy-2'-fluorouridine-3'-phosphate
  modified_base 5: mod_base = OTHER; note = 2'-O-methyladenosine-3'-phosphate
  modified_base 6: mod_base = OTHER; note = 2'-deoxy-2'-fluoroguanosine-3'-phosphate
  modified_base 7: mod_base = OTHER; note = 2'-O-methyladenosine-3'-phosphate
  modified_base 8: mod_base = OTHER; note = 2'-deoxy-2'-fluorouridine-3'-phosphate
  modified_base 9: mod_base = OTHER; note = 2'-O-methyluridine-3'-phosphate
  modified_base 10: mod_base = OTHER; note = 2'-deoxy-2'-fluoroguanosine-3'-phosphate
  modified_base 11: mod_base = OTHER; note = 2'-O-methylcytidine-3'-phosphate
  modified_base 12: mod_base = OTHER; note = 2'-O-methyluridine-3'-phosphate
  modified_base 13: mod_base = OTHER; note = 2'-O-methyluridine-3'-phosphate
  modified_base 14: mod_base = OTHER; note = 2'-deoxy-2'-fluorocytidine-3'-phosphate
  modified_base 15: mod_base = OTHER; note = 2'-O-methyladenosine-3'-phosphate
  modified_base 16: mod_base = OTHER; note = 2'-deoxy-2'-fluorocytidine-3'-phosphate
  modified_base 17: mod_base = OTHER; note = 2'-O-methyluridine-3'-phosphate
  modified_base 18: mod_base = OTHER; note = 2'-deoxy-2'-fluoroadenosine-3'-phosphate
  modified_base 19: mod_base = OTHER; note = 2'-O-methyluridine-3'-phosphate
  modified_base 20: mod_base = OTHER; note = 2'-deoxy-2'-fluoroguanosine-3'-phosphate
  modified_base 21: mod_base = OTHER; note = 2'-O-methylguanosine-3'-phosphorothioate
  modified_base 22: mod_base = OTHER; note = 2'-deoxy-2'-fluoroadenosine-3'-phosphorothioate
  modified_base 23: mod_base = OTHER; note = 2'-O-methylguanosine
aattagattgcttcactatggag

SEQ ID NO: 1150 - RNA, 23 nt, synthetic construct
  source 1..23: mol_type = other RNA
  modified_base 1: mod_base = OTHER; note = 2'-O-methyladenosine-3'-phosphate
  modified_base 2: mod_base = OTHER; note = 2'-deoxy-2'-fluoroadenosine-3'-phosphate
  modified_base 3: mod_base = OTHER; note = 2'-O-methyluridine-3'-phosphate
  modified_base 4: mod_base = OTHER; note = 2'-deoxy-2'-fluoroadenosine-3'-phosphate
  modified_base 5: mod_base = OTHER; note = 2'-O-methyluridine-3'-phosphate
  modified_base 6: mod_base = OTHER; note = 2'-deoxy-2'-fluorouridine-3'-phosphate
  modified_base 7: mod_base = OTHER; note = 2'-O-methylcytidine-3'-phosphate
  modified_base 8: mod_base = OTHER; note = 2'-deoxy-2'-fluoroadenosine-3'-phosphate
  modified_base 9: mod_base = OTHER; note = 2'-O-methyladenosine-3'-phosphate
  modified_base 10: mod_base = OTHER; note = 2'-deoxy-2'-fluorouridine-3'-phosphate
  modified_base 11: mod_base = OTHER; note = 2'-O-methyladenosine-3'-phosphate
  modified_base 12: mod_base = OTHER; note = 2'-O-methyluridine-3'-phosphate
  modified_base 13: mod_base = OTHER; note = 2'-O-methyladenosine-3'-phosphate
  modified_base 14: mod_base = OTHER; note = 2'-deoxy-2'-fluoroadenosine-3'-phosphate
  modified_base 15: mod_base = OTHER; note = 2'-O-methyluridine-3'-phosphate
  modified_base 16: mod_base = OTHER; note = 2'-deoxy-2'-fluoroguanosine-3'-phosphate
  modified_base 17: mod_base = OTHER; note = 2'-O-methyluridine-3'-phosphate
  modified_base 18: mod_base = OTHER; note = 2'-deoxy-2'-fluorouridine-3'-phosphate
  modified_base 19: mod_base = OTHER; note = 2'-O-methyluridine-3'-phosphate
  modified_base 20: mod_base = OTHER; note = 2'-deoxy-2'-fluoroguanosine-3'-phosphate
  modified_base 21: mod_base = OTHER; note = 2'-O-methyluridine-3'-phosphorothioate
  modified_base 22: mod_base = OTHER; note = 2'-deoxy-2'-fluorouridine-3'-phosphorothioate
  modified_base 23: mod_base = OTHER; note = 2'-O-methylguanosine
aatattcaatataatgtttgttg

SEQ ID NO: 1151 - RNA, 23 nt, synthetic construct
  source 1..23: mol_type = other RNA
  modified_base 1: mod_base = OTHER; note = 2'-O-methyluridine-3'-phosphate
  modified_base 2: mod_base = OTHER; note = 2'-deoxy-2'-fluorouridine-3'-phosphate
  modified_base 3: mod_base = OTHER; note = 2'-O-methyluridine-3'-phosphate
  modified_base 4: mod_base = OTHER; note = 2'-deoxy-2'-fluoroguanosine-3'-phosphate
  modified_base 5: mod_base = OTHER; note = 2'-O-methyluridine-3'-phosphate
  modified_base 6: mod_base = OTHER; note = 2'-deoxy-2'-fluorouridine-3'-phosphate
  modified_base 7: mod_base = OTHER; note = 2'-O-methyluridine-3'-phosphate
  modified_base 8: mod_base = OTHER; note = 2'-deoxy-2'-fluorouridine-3'-phosphate
  modified_base 9: mod_base = OTHER; note = 2'-O-methylcytidine-3'-phosphate
  modified_base 10: mod_base = OTHER; note = 2'-deoxy-2'-fluorocytidine-3'-phosphate
  modified_base 11: mod_base = OTHER; note = 2'-O-methylguanosine-3'-phosphate
  modified_base 12: mod_base = OTHER; note = 2'-O-methylguanosine-3'-phosphate
  modified_base 13: mod_base = OTHER; note = 2'-O-methylguanosine-3'-phosphate
  modified_base 14: mod_base = OTHER; note = 2'-deoxy-2'-fluoroadenosine-3'-phosphate
  modified_base 15: mod_base = OTHER; note = 2'-O-methyluridine-3'-phosphate
  modified_base 16: mod_base = OTHER; note = 2'-deoxy-2'-fluorouridine-3'-phosphate
  modified_base 17: mod_base = OTHER; note = 2'-O-methylguanosine-3'-phosphate
  modified_base 18: mod_base = OTHER; note = 2'-deoxy-2'-fluorocytidine-3'-phosphate
  modified_base 19: mod_base = OTHER; note = 2'-O-methyladenosine-3'-phosphate
  modified_base 20: mod_base = OTHER; note = 2'-deoxy-2'-fluorouridine-3'-phosphate
  modified_base 21: mod_base = OTHER; note = 2'-O-methyluridine-3'-phosphorothioate
  modified_base 22: mod_base = OTHER; note = 2'-deoxy-2'-fluoroguanosine-3'-phosphorothioate
  modified_base 23: mod_base = OTHER; note = 2'-O-methylguanosine
tttgttttccgggattgcattgg

SEQ ID NO: 1152 - RNA, 23 nt, synthetic construct
  source 1..23: mol_type = other RNA
  modified_base 1: mod_base = OTHER; note = 2'-O-methyluridine-3'-phosphate
  modified_base 2: mod_base = OTHER; note = 2'-deoxy-2'-fluorouridine-3'-phosphate
  modified_base 3: mod_base = OTHER; note = 2'-O-methyladenosine-3'-phosphate
  modified_base 4: mod_base = OTHER; note = 2'-deoxy-2'-fluoroadenosine-3'-phosphate
  modified_base 5: mod_base = OTHER; note = 2'-O-methyluridine-3'-phosphate
  modified_base 6: mod_base = OTHER; note = 2'-deoxy-2'-fluoroguanosine-3'-phosphate
  modified_base 7: mod_base = OTHER; note = 2'-O-methyluridine-3'-phosphate
  modified_base 8: mod_base = OTHER; note = 2'-deoxy-2'-fluorocytidine-3'-phosphate
  modified_base 9: mod_base = OTHER; note = 2'-O-methylcytidine-3'-phosphate
  modified_base 10: mod_base = OTHER; note = 2'-deoxy-2'-fluoroadenosine-3'-phosphate
  modified_base 11: mod_base = OTHER; note = 2'-O-methyluridine-3'-phosphate
  modified_base 12: mod_base = OTHER; note = 2'-O-methylguanosine-3'-phosphate
  modified_base 13: mod_base = OTHER; note = 2'-O-methylguanosine-3'-phosphate
  modified_base 14: mod_base = OTHER; note = 2'-deoxy-2'-fluoroadenosine-3'-phosphate
  modified_base 15: mod_base = OTHER; note = 2'-O-methylcytidine-3'-phosphate
  modified_base 16: mod_base = OTHER; note = 2'-deoxy-2'-fluorouridine-3'-phosphate
  modified_base 17: mod_base = OTHER; note = 2'-O-methyladenosine-3'-phosphate
  modified_base 18: mod_base = OTHER; note = 2'-deoxy-2'-fluorocytidine-3'-phosphate
  modified_base 19: mod_base = OTHER; note = 2'-O-methylcytidine-3'-phosphate
  modified_base 20: mod_base = OTHER; note = 2'-deoxy-2'-fluorouridine-3'-phosphate
  modified_base 21: mod_base = OTHER; note = 2'-O-methylguanosine-3'-phosphorothioate
  modified_base 22: mod_base = OTHER; note = 2'-deoxy-2'-fluoroadenosine-3'-phosphorothioate
  modified_base 23: mod_base = OTHER; note = 2'-O-methyluridine
ttaatgtccatggactacctgat

SEQ ID NO: 1153 - RNA, 23 nt, synthetic construct
  source 1..23: mol_type = other RNA
  modified_base 1: mod_base = OTHER; note = 2'-O-methyladenosine-3'-phosphate
  modified_base 2: mod_base = OTHER; note = 2'-deoxy-2'-fluorouridine-3'-phosphate
  modified_base 3: mod_base = OTHER; note = 2'-O-methylcytidine-3'-phosphate
  modified_base 4: mod_base = OTHER; note = 2'-deoxy-2'-fluorocytidine-3'-phosphate
  modified_base 5: mod_base = OTHER; note = 2'-O-methyladenosine-3'-phosphate
  modified_base 6: mod_base = OTHER; note = 2'-deoxy-2'-fluorouridine-3'-phosphate
  modified_base 7: mod_base = OTHER; note = 2'-O-methylcytidine-3'-phosphate
  modified_base 8: mod_base = OTHER; note = 2'-deoxy-2'-fluorouridine-3'-phosphate
  modified_base 9: mod_base = OTHER; note = 2'-O-methyladenosine-3'-phosphate
  modified_base 10: mod_base = OTHER; note = 2'-deoxy-2'-fluorouridine-3'-phosphate
  modified_base 11: mod_base = OTHER; note = 2'-O-methyluridine-3'-phosphate
  modified_base 12: mod_base = OTHER; note = 2'-O-methylcytidine-3'-phosphate
  modified_base 13: mod_base = OTHER; note = 2'-O-methylguanosine-3'-phosphate
  modified_base 14: mod_base = OTHER; note = 2'-deoxy-2'-fluoroadenosine-3'-phosphate
  modified_base 15: mod_base = OTHER; note = 2'-O-methyluridine-3'-phosphate
  modified_base 16: mod_base = OTHER; note = 2'-deoxy-2'-fluoroguanosine-3'-phosphate
  modified_base 17: mod_base = OTHER; note = 2'-O-methyluridine-3'-phosphate
  modified_base 18: mod_base = OTHER; note = 2'-deoxy-2'-fluorouridine-3'-phosphate
  modified_base 19: mod_base = OTHER; note = 2'-O-methylguanosine-3'-phosphate
  modified_base 20: mod_base = OTHER; note = 2'-deoxy-2'-fluoroadenosine-3'-phosphate
  modified_base 21: mod_base = OTHER; note = 2'-O-methyladenosine-3'-phosphorothioate
  modified_base 22: mod_base = OTHER; note = 2'-deoxy-2'-fluorouridine-3'-phosphorothioate
  modified_base 23: mod_base = OTHER; note = 2'-O-methyluridine
atccatctattcgatgttgaatt

SEQ ID NO: 1154 - RNA, 23 nt, synthetic construct
  source 1..23: mol_type = other RNA
  modified_base 1: mod_base = OTHER; note = 2'-O-methyluridine-3'-phosphate
  modified_base 2: mod_base = OTHER; note = 2'-deoxy-2'-fluoroadenosine-3'-phosphate
  modified_base 3: mod_base = OTHER; note = 2'-O-methyluridine-3'-phosphate
  modified_base 4: mod_base = OTHER; note = 2'-deoxy-2'-fluoroadenosine-3'-phosphate
  modified_base 5: mod_base = OTHER; note = 2'-O-methyluridine-3'-phosphate
  modified_base 6: mod_base = OTHER; note = 2'-deoxy-2'-fluorocytidine-3'-phosphate
  modified_base 7: mod_base = OTHER; note = 2'-O-methyluridine-3'-phosphate
  modified_base 8: mod_base = OTHER; note = 2'-deoxy-2'-fluorouridine-3'-phosphate
  modified_base 9: mod_base = OTHER; note = 2'-O-methylcytidine-3'-phosphate
  modified_base 10: mod_base = OTHER; note = 2'-deoxy-2'-fluorouridine-3'-phosphate
  modified_base 11: mod_base = OTHER; note = 2'-O-methylcytidine-3'-phosphate
  modified_base 12: mod_base = OTHER; note = 2'-O-methyluridine-3'-phosphate
  modified_base 13: mod_base = OTHER; note = 2'-O-methyladenosine-3'-phosphate
  modified_base 14: mod_base = OTHER; note = 2'-deoxy-2'-fluoroguanosine-3'-phosphate
  modified_base 15: mod_base = OTHER; note = 2'-O-methylguanosine-3'-phosphate
  modified_base 16: mod_base = OTHER; note = 2'-deoxy-2'-fluorocytidine-3'-phosphate
  modified_base 17: mod_base = OTHER; note = 2'-O-methylcytidine-3'-phosphate
  modified_base 18: mod_base = OTHER; note = 2'-deoxy-2'-fluorocytidine-3'-phosphate
  modified_base 19: mod_base = OTHER; note = 2'-O-methyladenosine-3'-phosphate
  modified_base 20: mod_base = OTHER; note = 2'-deoxy-2'-fluoroadenosine-3'-phosphate
  modified_base 21: mod_base = OTHER; note = 2'-O-methylcytidine-3'-phosphorothioate
  modified_base 22: mod_base = OTHER; note = 2'-deoxy-2'-fluorocytidine-3'-phosphorothioate
  modified_base 23: mod_base = OTHER; note = 2'-O-methyladenosine
tatatcttctctaggcccaacca

SEQ ID NO: 1155 - RNA, 23 nt, synthetic construct
  source 1..23: mol_type = other RNA
  modified_base 1: mod_base = OTHER; note = 2'-O-methyluridine-3'-phosphate
  modified_base 2: mod_base = OTHER; note = 2'-deoxy-2'-fluoroadenosine-3'-phosphate
  modified_base 3: mod_base = OTHER; note = 2'-O-methyladenosine-3'-phosphate
  modified_base 4: mod_base = OTHER; note = 2'-deoxy-2'-fluorouridine-3'-phosphate
  modified_base 5: mod_base = OTHER; note = 2'-O-methyluridine-3'-phosphate
  modified_base 6: mod_base = OTHER; note = 2'-deoxy-2'-fluoroadenosine-3'-phosphate
  modified_base 7: mod_base = OTHER; note = 2'-O-methylguanosine-3'-phosphate
  modified_base 8: mod_base = OTHER; note = 2'-deoxy-2'-fluoroadenosine-3'-phosphate
  modified_base 9: mod_base = OTHER; note = 2'-O-methyluridine-3'-phosphate
  modified_base 10: mod_base = OTHER; note = 2'-deoxy-2'-fluorouridine-3'-phosphate
  modified_base 11: mod_base = OTHER; note = 2'-O-methylguanosine-3'-phosphate
  modified_base 12: mod_base = OTHER; note = 2'-O-methylcytidine-3'-phosphate
  modified_base 13: mod_base = OTHER; note = 2'-O-methyluridine-3'-phosphate
  modified_base 14: mod_base = OTHER; note = 2'-deoxy-2'-fluorouridine-3'-phosphate
  modified_base 15: mod_base = OTHER; note = 2'-O-methylcytidine-3'-phosphate
  modified_base 16: mod_base = OTHER; note = 2'-deoxy-2'-fluoroadenosine-3'-phosphate
  modified_base 17: mod_base = OTHER; note = 2'-O-methylcytidine-3'-phosphate
  modified_base 18: mod_base = OTHER; note = 2'-deoxy-2'-fluorouridine-3'-phosphate
  modified_base 19: mod_base = OTHER; note = 2'-O-methyladenosine-3'-phosphate
  modified_base 20: mod_base = OTHER; note = 2'-deoxy-2'-fluorouridine-3'-phosphate
  modified_base 21: mod_base = OTHER; note = 2'-O-methylguanosine-3'-phosphorothioate
  modified_base 22: mod_base = OTHER; note = 2'-deoxy-2'-fluoroguanosine-3'-phosphorothioate
  modified_base 23: mod_base = OTHER; note = 2'-O-methyladenosine
taattagattgcttcactatgga

SEQ ID NO: 1156 - RNA, 23 nt, synthetic construct
  source 1..23: mol_type = other RNA
  modified_base 1: mod_base = OTHER; note = 2'-O-methyladenosine-3'-phosphate
  modified_base 2: mod_base = OTHER; note = 2'-deoxy-2'-fluoroadenosine-3'-phosphate
  modified_base 3: mod_base = OTHER; note = 2'-O-methylguanosine-3'-phosphate
  modified_base 4: mod_base = OTHER; note = 2'-deoxy-2'-fluoroadenosine-3'-phosphate
  modified_base 5: mod_base = OTHER; note = 2'-O-methyladenosine-3'-phosphate
  modified_base 6: mod_base = OTHER; note = 2'-deoxy-2'-fluorouridine-3'-phosphate
  modified_base 7: mod_base = OTHER; note = 2'-O-methyladenosine-3'-phosphate
  modified_base 8: mod_base = OTHER; note = 2'-deoxy-2'-fluorouridine-3'-phosphate
  modified_base 9: mod_base = OTHER; note = 2'-O-methyluridine-3'-phosphate
  modified_base 10: mod_base = OTHER; note = 2'-deoxy-2'-fluorocytidine-3'-phosphate
  modified_base 11: mod_base = OTHER; note = 2'-O-methyladenosine-3'-phosphate
  modified_base 12: mod_base = OTHER; note = 2'-O-methyladenosine-3'-phosphate
  modified_base 13: mod_base = OTHER; note = 2'-O-methyluridine-3'-phosphate
  modified_base 14: mod_base = OTHER; note = 2'-deoxy-2'-fluoroadenosine-3'-phosphate
  modified_base 15: mod_base = OTHER; note = 2'-O-methyluridine-3'-phosphate
  modified_base 16: mod_base = OTHER; note = 2'-deoxy-2'-fluoroadenosine-3'-phosphate
  modified_base 17: mod_base = OTHER; note = 2'-O-methyladenosine-3'-phosphate
  modified_base 18: mod_base = OTHER; note = 2'-deoxy-2'-fluorouridine-3'-phosphate
  modified_base 19: mod_base = OTHER; note = 2'-O-methylguanosine-3'-phosphate
  modified_base 20: mod_base = OTHER; note = 2'-deoxy-2'-fluorouridine-3'-phosphate
  modified_base 21: mod_base = OTHER; note = 2'-O-methyluridine-3'-phosphorothioate
  modified_base 22: mod_base = OTHER; note = 2'-deoxy-2'-fluorouridine-3'-phosphorothioate
  modified_base 23: mod_base = OTHER; note = 2'-O-methylguanosine
aagaatattcaatataatgtttg

SEQ ID NO: 1157 - RNA, 23 nt, synthetic construct
  source 1..23: mol_type = other RNA
  modified_base 1: mod_base = OTHER; note = 2'-O-methyladenosine-3'-phosphate
  modified_base 2: mod_base = OTHER; note = 2'-deoxy-2'-fluorouridine-3'-phosphate
  modified_base 3: mod_base = OTHER; note = 2'-O-methylcytidine-3'-phosphate
  modified_base 4: mod_base = OTHER; note = 2'-deoxy-2'-fluorouridine-3'-phosphate
  modified_base 5: mod_base = OTHER; note = 2'-O-methyluridine-3'-phosphate
  modified_base 6: mod_base = OTHER; note = 2'-deoxy-2'-fluorouridine-3'-phosphate
  modified_base 7: mod_base = OTHER; note = 2'-O-methylguanosine-3'-phosphate
  modified_base 8: mod_base = OTHER; note = 2'-deoxy-2'-fluorouridine-3'-phosphate
  modified_base 9: mod_base = OTHER; note = 2'-O-methyluridine-3'-phosphate
  modified_base 10: mod_base = OTHER; note = 2'-deoxy-2'-fluorouridine-3'-phosphate
  modified_base 11: mod_base = OTHER; note = 2'-O-methyluridine-3'-phosphate
  modified_base 12: mod_base = OTHER; note = 2'-O-methylcytidine-3'-phosphate
  modified_base 13: mod_base = OTHER; note = 2'-O-methylcytidine-3'-phosphate
  modified_base 14: mod_base = OTHER; note = 2'-deoxy-2'-fluoroguanosine-3'-phosphate
  modified_base 15: mod_base = OTHER; note = 2'-O-methylguanosine-3'-phosphate
  modified_base 16: mod_base = OTHER; note = 2'-deoxy-2'-fluoroguanosine-3'-phosphate
  modified_base 17: mod_base = OTHER; note = 2'-O-methyladenosine-3'-phosphate
  modified_base 18: mod_base = OTHER; note = 2'-deoxy-2'-fluorouridine-3'-phosphate
  modified_base 19: mod_base = OTHER; note = 2'-O-methyluridine-3'-phosphate
  modified_base 20: mod_base = OTHER; note = 2'-deoxy-2'-fluoroguanosine-3'-phosphate
  modified_base 21: mod_base = OTHER; note = 2'-O-methylcytidine-3'-phosphorothioate
  modified_base 22: mod_base = OTHER; note = 2'-deoxy-2'-fluoroadenosine-3'-phosphorothioate
  modified_base 23: mod_base = OTHER; note = 2'-O-methyluridine
atctttgttttccgggattgcat

SEQ ID NO: 1158 - RNA, 23 nt, synthetic construct
  source 1..23: mol_type = other RNA
  modified_base 1: mod_base = OTHER; note = 2'-O-methyladenosine-3'-phosphate
  modified_base 2: mod_base = OTHER; note = 2'-deoxy-2'-fluoroadenosine-3'-phosphate
  modified_base 3: mod_base = OTHER; note = 2'-O-methyluridine-3'-phosphate
  modified_base 4: mod_base = OTHER; note = 2'-deoxy-2'-fluorouridine-3'-phosphate
  modified_base 5: mod_base = OTHER; note = 2'-O-methyladenosine-3'-phosphate
  modified_base 6: mod_base = OTHER; note = 2'-deoxy-2'-fluoroadenosine-3'-phosphate
  modified_base 7: mod_base = OTHER; note = 2'-O-methyluridine-3'-phosphate
  modified_base 8: mod_base = OTHER; note = 2'-deoxy-2'-fluoroguanosine-3'-phosphate
  modified_base 9: mod_base = OTHER; note = 2'-O-methyluridine-3'-phosphate
  modified_base 10: mod_base = OTHER; note = 2'-deoxy-2'-fluorocytidine-3'-phosphate
  modified_base 11: mod_base = OTHER; note = 2'-O-methylcytidine-3'-phosphate
  modified_base 12: mod_base = OTHER; note = 2'-O-methyladenosine-3'-phosphate
  modified_base 13: mod_base = OTHER; note = 2'-O-methyluridine-3'-phosphate
  modified_base 14: mod_base = OTHER; note = 2'-deoxy-2'-fluoroguanosine-3'-phosphate
  modified_base 15: mod_base = OTHER; note = 2'-O-methylguanosine-3'-phosphate
  modified_base 16: mod_base = OTHER; note = 2'-deoxy-2'-fluoroadenosine-3'-phosphate
  modified_base 17: mod_base = OTHER; note = 2'-O-methylcytidine-3'-phosphate
  modified_base 18: mod_base = OTHER; note = 2'-deoxy-2'-fluorouridine-3'-phosphate
  modified_base 19: mod_base = OTHER; note = 2'-O-methyladenosine-3'-phosphate
  modified_base 20: mod_base = OTHER; note = 2'-deoxy-2'-fluorocytidine-3'-phosphate
  modified_base 21: mod_base = OTHER; note = 2'-O-methylcytidine-3'-phosphorothioate
  modified_base 22: mod_base = OTHER; note = 2'-deoxy-2'-fluorouridine-3'-phosphorothioate
  modified_base 23: mod_base = OTHER; note = 2'-O-methylguanosine
aattaatgtccatggactacctg

SEQ ID NO: 1159 - RNA, 23 nt, synthetic construct
  source 1..23: mol_type = other RNA
  modified_base 1: mod_base = OTHER; note = 2'-O-methyluridine-3'-phosphate
  modified_base 2: mod_base = OTHER; note = 2'-deoxy-2'-fluorouridine-3'-phosphate
  modified_base 3: mod_base = OTHER; note = 2'-O-methyluridine-3'-phosphate
  modified_base 4: mod_base = OTHER; note = 2'-deoxy-2'-fluoroguanosine-3'-phosphate
  modified_base 5: mod_base = OTHER; note = 2'-O-methyluridine-3'-phosphate
  modified_base 6: mod_base = OTHER; note = 2'-deoxy-2'-fluoroguanosine-3'-phosphate
  modified_base 7: mod_base = OTHER; note = 2'-O-methyladenosine-3'-phosphate
  modified_base 8: mod_base = OTHER; note = 2'-deoxy-2'-fluorouridine-3'-phosphate
  modified_base 9: mod_base = OTHER; note = 2'-O-methylcytidine-3'-phosphate
  modified_base 10: mod_base = OTHER; note = 2'-deoxy-2'-fluorocytidine-3'-phosphate
  modified_base 11: mod_base = OTHER; note = 2'-O-methyladenosine-3'-phosphate
  modified_base 12: mod_base = OTHER; note = 2'-O-methyluridine-3'-phosphate
  modified_base 13: mod_base = OTHER; note = 2'-O-methylcytidine-3'-phosphate
  modified_base 14: mod_base = OTHER; note = 2'-deoxy-2'-fluorouridine-3'-phosphate
  modified_base 15: mod_base = OTHER; note = 2'-O-methyladenosine-3'-phosphate
  modified_base 16: mod_base = OTHER; note = 2'-deoxy-2'-fluorouridine-3'-phosphate
  modified_base 17: mod_base = OTHER; note = 2'-O-methyluridine-3'-phosphate
  modified_base 18: mod_base = OTHER; note = 2'-deoxy-2'-fluorocytidine-3'-phosphate
  modified_base 19: mod_base = OTHER; note = 2'-O-methylguanosine-3'-phosphate
  modified_base 20: mod_base = OTHER; note = 2'-deoxy-2'-fluoroadenosine-3'-phosphate
  modified_base 21: mod_base = OTHER; note = 2'-O-methyluridine-3'-phosphorothioate
  modified_base 22: mod_base = OTHER; note = 2'-deoxy-2'-fluoroguanosine-3'-phosphorothioate
  modified_base 23: mod_base = OTHER; note = 2'-O-methyluridine
tttgtgatccatctattcgatgt

SEQ ID NO: 1160 - RNA, 23 nt, synthetic construct
  source 1..23: mol_type = other RNA
  modified_base 1: mod_base = OTHER; note = 2'-O-methyladenosine-3'-phosphate
  modified_base 2: mod_base = OTHER; note = 2'-deoxy-2'-fluorouridine-3'-phosphate
  modified_base 3: mod_base = OTHER; note = 2'-O-methylguanosine-3'-phosphate
  modified_base 4: mod_base = OTHER; note = 2'-deoxy-2'-fluoroguanosine-3'-phosphate
  modified_base 5: mod_base = OTHER; note = 2'-O-methyladenosine-3'-phosphate
  modified_base 6: mod_base = OTHER; note = 2'-deoxy-2'-fluoroguanosine-3'-phosphate
  modified_base 7: mod_base = OTHER; note = 2'-O-methyluridine-3'-phosphate
  modified_base 8: mod_base = OTHER; note = 2'-deoxy-2'-fluoroadenosine-3'-phosphate
  modified_base 9: mod_base = OTHER; note = 2'-O-methyluridine-3'-phosphate
  modified_base 10: mod_base = OTHER; note = 2'-deoxy-2'-fluoroadenosine-3'-phosphate
  modified_base 11: mod_base = OTHER; note = 2'-O-methyluridine-3'-phosphate
  modified_base 12: mod_base = OTHER; note = 2'-O-methylcytidine-3'-phosphate
  modified_base 13: mod_base = OTHER; note = 2'-O-methyluridine-3'-phosphate
  modified_base 14: mod_base = OTHER; note = 2'-deoxy-2'-fluorouridine-3'-phosphate
  modified_base 15: mod_base = OTHER; note = 2'-O-methylcytidine-3'-phosphate
  modified_base 16: mod_base = OTHER; note = 2'-deoxy-2'-fluorouridine-3'-phosphate
  modified_base 17: mod_base = OTHER; note = 2'-O-methylcytidine-3'-phosphate
  modified_base 18: mod_base = OTHER; note = 2'-deoxy-2'-fluorouridine-3'-phosphate
  modified_base 19: mod_base = OTHER; note = 2'-O-methyladenosine-3'-phosphate
  modified_base 20: mod_base = OTHER; note = 2'-deoxy-2'-fluoroguanosine-3'-phosphate
  modified_base 21: mod_base = OTHER; note = 2'-O-methylguanosine-3'-phosphorothioate
  modified_base 22: mod_base = OTHER; note = 2'-deoxy-2'-fluorocytidine-3'-phosphorothioate
  modified_base 23: mod_base = OTHER; note = 2'-O-methylcytidine
atggagtatatcttctctaggcc

SEQ ID NO: 1161 - RNA, 23 nt, synthetic construct
  source 1..23: mol_type = other RNA
  modified_base 1: mod_base = OTHER; note = 2'-O-methyluridine-3'-phosphate
  modified_base 2: mod_base = OTHER; note = 2'-deoxy-2'-fluorouridine-3'-phosphate
  modified_base 3: mod_base = OTHER; note = 2'-O-methylguanosine-3'-phosphate
  modified_base 4: mod_base = OTHER; note = 2'-deoxy-2'-fluorouridine-3'-phosphate
  modified_base 5: mod_base = OTHER; note = 2'-O-methylcytidine-3'-phosphate
  modified_base 6: mod_base = OTHER; note = 2'-deoxy-2'-fluorouridine-3'-phosphate
  modified_base 7: mod_base = OTHER; note = 2'-O-methyluridine-3'-phosphate
  modified_base 8: mod_base = OTHER; note = 2'-deoxy-2'-fluorouridine-3'-phosphate
  modified_base 9: mod_base = OTHER; note = 2'-O-methylcytidine-3'-phosphate
  modified_base 10: mod_base = OTHER; note = 2'-deoxy-2'-fluorocytidine-3'-phosphate
  modified_base 11: mod_base = OTHER; note = 2'-O-methyladenosine-3'-phosphate
  modified_base 12: mod_base = OTHER; note = 2'-O-methylguanosine-3'-phosphate
  modified_base 13: mod_base = OTHER; note = 2'-O-methyluridine-3'-phosphate
  modified_base 14: mod_base = OTHER; note = 2'-deoxy-2'-fluorocytidine-3'-phosphate
  modified_base 15: mod_base = OTHER; note = 2'-O-methyluridine-3'-phosphate
  modified_base 16: mod_base = OTHER; note = 2'-deoxy-2'-fluorouridine-3'-phosphate
  modified_base 17: mod_base = OTHER; note = 2'-O-methylcytidine-3'-phosphate
  modified_base 18: mod_base = OTHER; note = 2'-deoxy-2'-fluorocytidine-3'-phosphate
  modified_base 19: mod_base = OTHER; note = 2'-O-methyladenosine-3'-phosphate
  modified_base 20: mod_base = OTHER; note = 2'-deoxy-2'-fluoroadenosine-3'-phosphate
  modified_base 21: mod_base = OTHER; note = 2'-O-methylcytidine-3'-phosphorothioate
  modified_base 22: mod_base = OTHER; note = 2'-deoxy-2'-fluorouridine-3'-phosphorothioate
  modified_base 23: mod_base = OTHER; note = 2'-O-methylcytidine
ttgtctttccagtcttccaactc

SEQ ID NO: 1162 - RNA, 23 nt, synthetic construct
  source 1..23: mol_type = other RNA
  modified_base 1: mod_base = OTHER; note = 2'-O-methyladenosine-3'-phosphate
  modified_base 2: mod_base = OTHER; note = 2'-deoxy-2'-fluoroadenosine-3'-phosphate
  modified_base 3: mod_base = OTHER; note = 2'-O-methyladenosine-3'-phosphate
  modified_base 4: mod_base = OTHER; note = 2'-deoxy-2'-fluoroguanosine-3'-phosphate
  modified_base 5: mod_base = OTHER; note = 2'-O-methyladenosine-3'-phosphate
  modified_base 6: mod_base = OTHER; note = 2'-deoxy-2'-fluoroadenosine-3'-phosphate
  modified_base 7: mod_base = OTHER; note = 2'-O-methyluridine-3'-phosphate
  modified_base 8: mod_base = OTHER; note = 2'-deoxy-2'-fluoroadenosine-3'-phosphate
  modified_base 9: mod_base = OTHER; note = 2'-O-methyluridine-3'-phosphate
  modified_base 10: mod_base = OTHER; note = 2'-deoxy-2'-fluorouridine-3'-phosphate
  modified_base 11: mod_base = OTHER; note = 2'-O-methylcytidine-3'-phosphate
  modified_base 12: mod_base = OTHER; note = 2'-O-methyladenosine-3'-phosphate
  modified_base 13: mod_base = OTHER; note = 2'-O-methyladenosine-3'-phosphate
  modified_base 14: mod_base = OTHER; note = 2'-deoxy-2'-fluorouridine-3'-phosphate
  modified_base 15: mod_base = OTHER; note = 2'-O-methyladenosine-3'-phosphate
  modified_base 16: mod_base = OTHER; note = 2'-deoxy-2'-fluorouridine-3'-phosphate
  modified_base 17: mod_base = OTHER; note = 2'-O-methyladenosine-3'-phosphate
  modified_base 18: mod_base = OTHER; note = 2'-deoxy-2'-fluoroadenosine-3'-phosphate
  modified_base 19: mod_base = OTHER; note = 2'-O-methyluridine-3'-phosphate
  modified_base 20: mod_base = OTHER; note = 2'-deoxy-2'-fluoroguanosine-3'-phosphate
  modified_base 21: mod_base = OTHER; note = 2'-O-methyluridine-3'-phosphorothioate
  modified_base 22: mod_base = OTHER; note = 2'-deoxy-2'-fluorouridine-3'-phosphorothioate
  modified_base 23: mod_base = OTHER; note = 2'-O-methyluridine
aaagaatattcaatataatgttt

SEQ ID NO: 1163 - RNA, 23 nt, synthetic construct
  source 1..23: mol_type = other RNA
  modified_base 1: mod_base = OTHER; note = 2'-O-methyladenosine-3'-phosphate
  modified_base 2: mod_base = OTHER; note = 2'-deoxy-2'-fluoroadenosine-3'-phosphate
  modified_base 3: mod_base = OTHER; note = 2'-O-methyluridine-3'-phosphate
  modified_base 4: mod_base = OTHER; note = 2'-deoxy-2'-fluorocytidine-3'-phosphate
  modified_base 5: mod_base = OTHER; note = 2'-O-methyluridine-3'-phosphate
  modified_base 6: mod_base = OTHER; note = 2'-deoxy-2'-fluorouridine-3'-phosphate
  modified_base 7: mod_base = OTHER; note = 2'-O-methyluridine-3'-phosphate
  modified_base 8: mod_base = OTHER; note = 2'-deoxy-2'-fluoroguanosine-3'-phosphate
  modified_base 9: mod_base = OTHER; note = 2'-O-methyluridine-3'-phosphate
  modified_base 10: mod_base = OTHER; note = 2'-deoxy-2'-fluorouridine-3'-phosphate
  modified_base 11: mod_base = OTHER; note = 2'-O-methyluridine-3'-phosphate
  modified_base 12: mod_base = OTHER; note = 2'-O-methyluridine-3'-phosphate
  modified_base 13: mod_base = OTHER; note = 2'-O-methylcytidine-3'-phosphate
  modified_base 14: mod_base = OTHER; note = 2'-deoxy-2'-fluorocytidine-3'-phosphate
  modified_base 15: mod_base = OTHER; note = 2'-O-methylguanosine-3'-phosphate
  modified_base 16: mod_base = OTHER; note = 2'-deoxy-2'-fluoroguanosine-3'-phosphate
  modified_base 17: mod_base = OTHER; note = 2'-O-methylguanosine-3'-phosphate
  modified_base 18: mod_base = OTHER; note = 2'-deoxy-2'-fluoroadenosine-3'-phosphate
  modified_base 19: mod_base = OTHER; note = 2'-O-methyluridine-3'-phosphate
  modified_base 20: mod_base = OTHER; note = 2'-deoxy-2'-fluorouridine-3'-phosphate
  modified_base 21: mod_base = OTHER; note = 2'-O-methylguanosine-3'-phosphorothioate
  modified_base 22: mod_base = OTHER; note = 2'-deoxy-2'-fluorocytidine-3'-phosphorothioate
  modified_base 23: mod_base = OTHER; note = 2'-O-methyladenosine
aatctttgttttccgggattgca

SEQ ID NO: 1164 - RNA, 23 nt, synthetic construct
  source 1..23: mol_type = other RNA
  modified_base 1: mod_base = OTHER; note = 2'-O-methyluridine-3'-phosphate
  modified_base 2: mod_base = OTHER; note = 2'-deoxy-2'-fluorouridine-3'-phosphate
  modified_base 3: mod_base = OTHER; note = 2'-O-methylguanosine-3'-phosphate
  modified_base 4: mod_base = OTHER; note = 2'-deoxy-2'-fluorocytidine-3'-phosphate
  modified_base 5: mod_base = OTHER; note = 2'-O-methyluridine-3'-phosphate
  modified_base 6: mod_base = OTHER; note = 2'-deoxy-2'-fluorouridine-3'-phosphate
  modified_base 7: mod_base = OTHER; note = 2'-O-methyluridine-3'-phosphate
  modified_base 8: mod_base = OTHER; note = 2'-deoxy-2'-fluoroguanosine-3'-phosphate
  modified_base 9: mod_base = OTHER; note = 2'-O-methyluridine-3'-phosphate
  modified_base 10: mod_base = OTHER; note = 2'-deoxy-2'-fluoroguanosine-3'-phosphate
  modified_base 11: mod_base = OTHER; note = 2'-O-methyladenosine-3'-phosphate
  modified_base 12: mod_base = OTHER; note = 2'-O-methyluridine-3'-phosphate
  modified_base 13: mod_base = OTHER; note = 2'-O-methylcytidine-3'-phosphate
  modified_base 14: mod_base = OTHER; note = 2'-deoxy-2'-fluorocytidine-3'-phosphate
  modified_base 15: mod_base = OTHER; note = 2'-O-methylcytidine-3'-phosphate
  modified_base 16: mod_base = OTHER; note = 2'-deoxy-2'-fluoroadenosine-3'-phosphate
  modified_base 17: mod_base = OTHER; note = 2'-O-methyladenosine-3'-phosphate
  modified_base 18: mod_base = OTHER; note = 2'-deoxy-2'-fluoroguanosine-3'-phosphate
  modified_base 19: mod_base = OTHER; note = 2'-O-methyluridine-3'-phosphate
  modified_base 20: mod_base = OTHER; note = 2'-deoxy-2'-fluoroadenosine-3'-phosphate
  modified_base 21: mod_base = OTHER; note = 2'-O-methylguanosine-3'-phosphorothioate
  modified_base 22: mod_base = OTHER; note = 2'-deoxy-2'-fluoroadenosine-3'-phosphorothioate
  modified_base 23: mod_base = OTHER; note = 2'-O-methyladenosine
ttgctttgtgatcccaagtagaa

SEQ ID NO: 1165 - RNA, 23 nt, synthetic construct
  source 1..23: mol_type = other RNA
  modified_base 1: mod_base = OTHER; note = 2'-O-methyluridine-3'-phosphate
  modified_base 2: mod_base = OTHER; note = 2'-deoxy-2'-fluoroadenosine-3'-phosphate
  modified_base 3: mod_base = OTHER; note = 2'-O-methyluridine-3'-phosphate
  modified_base 4: mod_base = OTHER; note = 2'-deoxy-2'-fluoroadenosine-3'-phosphate
  modified_base 5: mod_base = OTHER; note = 2'-O-methyluridine-3'-phosphate
  modified_base 6: mod_base = OTHER; note = 2'-deoxy-2'-fluorouridine-3'-phosphate
  modified_base 7: mod_base = OTHER; note = 2'-O-methyluridine-3'-phosphate
  modified_base 8: mod_base = OTHER; note = 2'-deoxy-2'-fluoroadenosine-3'-phosphate
  modified_base 9: mod_base = OTHER; note = 2'-O-methylcytidine-3'-phosphate
  modified_base 10: mod_base = OTHER; note = 2'-deoxy-2'-fluorocytidine-3'-phosphate
  modified_base 11: mod_base = OTHER; note = 2'-O-methyladenosine-3'-phosphate
  modified_base 12: mod_base = OTHER; note = 2'-O-methyluridine-3'-phosphate
  modified_base 13: mod_base = OTHER; note = 2'-O-methyluridine-3'-phosphate
  modified_base 14: mod_base = OTHER; note = 2'-deoxy-2'-fluorouridine-3'-phosphate
  modified_base 15: mod_base = OTHER; note = 2'-O-methyladenosine-3'-phosphate
  modified_base 16: mod_base = OTHER; note = 2'-deoxy-2'-fluoroguanosine-3'-phosphate
  modified_base 17: mod_base = OTHER; note = 2'-O-methylguanosine-3'-phosphate
  modified_base 18: mod_base = OTHER; note = 2'-deoxy-2'-fluorouridine-3'-phosphate
  modified_base 19: mod_base = OTHER; note = 2'-O-methyluridine-3'-phosphate
  modified_base 20: mod_base = OTHER; note = 2'-deoxy-2'-fluoroguanosine-3'-phosphate
  modified_base 21: mod_base = OTHER; note = 2'-O-methyluridine-3'-phosphorothioate
  modified_base 22: mod_base = OTHER; note = 2'-deoxy-2'-fluorouridine-3'-phosphorothioate
  modified_base 23: mod_base = OTHER; note = 2'-O-methyluridine
tatatttaccatttaggttgttt

SEQ ID NO: 1166 - RNA, 23 nt, synthetic construct
  source 1..23: mol_type = other RNA
  modified_base 1: mod_base = OTHER; note = 2'-O-methyluridine-3'-phosphate
  modified_base 2: mod_base = OTHER; note = 2'-deoxy-2'-fluorouridine-3'-phosphate
  modified_base 3: mod_base = OTHER; note = 2'-O-methylcytidine-3'-phosphate
  modified_base 4: mod_base = OTHER; note = 2'-deoxy-2'-fluorouridine-3'-phosphate
  modified_base 5: mod_base = OTHER; note = 2'-O-methylguanosine-3'-phosphate
  modified_base 6: mod_base = OTHER; note = 2'-deoxy-2'-fluoroadenosine-3'-phosphate
  modified_base 7: mod_base = OTHER; note = 2'-O-methyladenosine-3'-phosphate
  modified_base 8: mod_base = OTHER; note = 2'-deoxy-2'-fluorouridine-3'-phosphate
  modified_base 9: mod_base = OTHER; note = 2'-O-methylcytidine-3'-phosphate
  modified_base 10: mod_base = OTHER; note = 2'-deoxy-2'-fluorouridine-3'-phosphate
  modified_base 11: mod_base = OTHER; note = 2'-O-methylguanosine-3'-phosphate
  modified_base 12: mod_base = OTHER; note = 2'-O-methyluridine-3'-phosphate
  modified_base 13: mod_base = OTHER; note = 2'-O-methyluridine-3'-phosphate
  modified_base 14: mod_base = OTHER; note = 2'-deoxy-2'-fluoroguanosine-3'-phosphate
  modified_base 15: mod_base = OTHER; note = 2'-O-methylguanosine-3'-phosphate
  modified_base 16: mod_base = OTHER; note = 2'-deoxy-2'-fluoroadenosine-3'-phosphate
  modified_base 17: mod_base = OTHER; note = 2'-O-methyluridine-3'-phosphate
  modified_base 18: mod_base = OTHER; note = 2'-deoxy-2'-fluoroguanosine-3'-phosphate
  modified_base 19: mod_base = OTHER; note = 2'-O-methylguanosine-3'-phosphate
  modified_base 20: mod_base = OTHER; note = 2'-deoxy-2'-fluoroadenosine-3'-phosphate
  modified_base 21: mod_base = OTHER; note = 2'-O-methyluridine-3'-phosphorothioate
  modified_base 22: mod_base = OTHER; note = 2'-deoxy-2'-fluorocytidine-3'-phosphorothioate
  modified_base 23: mod_base = OTHER; note = 2'-O-methyladenosine
ttctgaatctgttggatggatca

SEQ ID NO: 1167 - RNA, 23 nt, synthetic construct
  source 1..23: mol_type = other RNA
  modified_base 1: mod_base = OTHER; note = 2'-O-methyluridine-3'-phosphate
  modified_base 2: mod_base = OTHER; note = 2'-deoxy-2'-fluorocytidine-3'-phosphate
  modified_base 3: mod_base = OTHER; note = 2'-O-methyluridine-3'-phosphate
  modified_base 4: mod_base = OTHER; note = 2'-deoxy-2'-fluorouridine-3'-phosphate
  modified_base 5: mod_base = OTHER; note = 2'-O-methyluridine-3'-phosphate
  modified_base 6: mod_base = OTHER; note = 2'-deoxy-2'-fluorouridine-3'-phosphate
  modified_base 7: mod_base = OTHER; note = 2'-O-methyladenosine-3'-phosphate
  modified_base 8: mod_base = OTHER; note = 2'-deoxy-2'-fluoroadenosine-3'-phosphate
  modified_base 9: mod_base = OTHER; note = 2'-O-methyladenosine-3'-phosphate
  modified_base 10: mod_base = OTHER; note = 2'-deoxy-2'-fluorouridine-3'-phosphate
  modified_base 11: mod_base = OTHER; note = 2'-O-methyluridine-3'-phosphate
  modified_base 12: mod_base = OTHER; note = 2'-O-methyluridine-3'-phosphate
  modified_base 13: mod_base = OTHER; note = 2'-O-methylguanosine-3'-phosphate
  modified_base 14: mod_base = OTHER; note = 2'-deoxy-2'-fluorocytidine-3'-phosphate
  modified_base 15: mod_base = OTHER; note = 2'-O-methylcytidine-3'-phosphate
  modified_base 16: mod_base = OTHER; note = 2'-deoxy-2'-fluorouridine-3'-phosphate
  modified_base 17: mod_base = OTHER; note = 2'-O-methylcytidine-3'-phosphate
  modified_base 18: mod_base = OTHER; note = 2'-deoxy-2'-fluoroadenosine-3'-phosphate
  modified_base 19: mod_base = OTHER; note = 2'-O-methylguanosine-3'-phosphate
  modified_base 20: mod_base = OTHER; note = 2'-deoxy-2'-fluorouridine-3'-phosphate
  modified_base 21: mod_base = OTHER; note = 2'-O-methyluridine-3'-phosphorothioate
  modified_base 22: mod_base = OTHER; note = 2'-deoxy-2'-fluorocytidine-3'-phosphorothioate
  modified_base 23: mod_base = OTHER; note = 2'-O-methyladenosine
tcttttaaatttgcctcagttca

SEQ ID NO: 1168 - RNA, 23 nt, synthetic construct
  source 1..23: mol_type = other RNA
  modified_base 1: mod_base = OTHER; note = 2'-O-methyladenosine-3'-phosphate
  modified_base 2: mod_base = OTHER; note = 2'-deoxy-2'-fluorocytidine-3'-phosphate
  modified_base 3: mod_base = OTHER; note = 2'-O-methyladenosine-3'-phosphate
  modified_base 4: mod_base = OTHER; note = 2'-deoxy-2'-fluoroguanosine-3'-phosphate
  modified_base 5: mod_base = OTHER; note = 2'-O-methyladenosine-3'-phosphate
  modified_base 6: mod_base = OTHER; note = 2'-deoxy-2'-fluorouridine-3'-phosphate
  modified_base 7: mod_base = OTHER; note = 2'-O-methyluridine-3'-phosphate
  modified_base 8: mod_base = OTHER; note = 2'-deoxy-2'-fluorouridine-3'-phosphate
  modified_base 9: mod_base = OTHER; note = 2'-O-methyluridine-3'-phosphate
  modified_base 10: mod_base = OTHER; note = 2'-deoxy-2'-fluorouridine-3'-phosphate
  modified_base 11: mod_base = OTHER; note = 2'-O-methyladenosine-3'-phosphate
  modified_base 12: mod_base = OTHER; note = 2'-O-methylcytidine-3'-phosphate
  modified_base 13: mod_base = OTHER; note = 2'-O-methyladenosine-3'-phosphate
  modified_base 14: mod_base = OTHER; note = 2'-deoxy-2'-fluorocytidine-3'-phosphate
  modified_base 15: mod_base = OTHER; note = 2'-O-methyladenosine-3'-phosphate
  modified_base 16: mod_base = OTHER; note = 2'-deoxy-2'-fluorouridine-3'-phosphate
  modified_base 17: mod_base = OTHER; note = 2'-O-methyladenosine-3'-phosphate
  modified_base 18: mod_base = OTHER; note = 2'-deoxy-2'-fluorocytidine-3'-phosphate
  modified_base 19: mod_base = OTHER; note = 2'-O-methyluridine-3'-phosphate
  modified_base 20: mod_base = OTHER; note = 2'-deoxy-2'-fluorocytidine-3'-phosphate
  modified_base 21: mod_base = OTHER; note = 2'-O-methyluridine-3'-phosphorothioate
  modified_base 22: mod_base = OTHER; note = 2'-deoxy-2'-fluoroguanosine-3'-phosphorothioate
  modified_base 23: mod_base = OTHER; note = 2'-O-methyluridine
acagatttttacacatactctgt

SEQ ID NO: 1169 - RNA, 23 nt, synthetic construct
  source 1..23: mol_type = other RNA
  modified_base 1: mod_base = OTHER; note = 2'-O-methyladenosine-3'-phosphate
  modified_base 2: mod_base = OTHER; note = 2'-deoxy-2'-fluoroadenosine-3'-phosphate
  modified_base 3: mod_base = OTHER; note = 2'-O-methyladenosine-3'-phosphate
  modified_base 4: mod_base = OTHER; note = 2'-deoxy-2'-fluorouridine-3'-phosphate
  modified_base 5: mod_base = OTHER; note = 2'-O-methylcytidine-3'-phosphate
  modified_base 6: mod_base = OTHER; note = 2'-deoxy-2'-fluorouridine-3'-phosphate
  modified_base 7: mod_base = OTHER; note = 2'-O-methyluridine-3'-phosphate
  modified_base 8: mod_base = OTHER; note = 2'-deoxy-2'-fluorouridine-3'-phosphate
  modified_base 9: mod_base = OTHER; note = 2'-O-methylguanosine-3'-phosphate
  modified_base 10: mod_base = OTHER; note = 2'-deoxy-2'-fluorouridine-3'-phosphate
  modified_base 11: mod_base = OTHER; note = 2'-O-methyluridine-3'-phosphate
  modified_base 12: mod_base = OTHER; note = 2'-O-methyluridine-3'-phosphate
  modified_base 13: mod_base = OTHER; note = 2'-O-methyluridine-3'-phosphate
  modified_base 14: mod_base = OTHER; note = 2'-deoxy-2'-fluorocytidine-3'-phosphate
  modified_base 15: mod_base = OTHER; note = 2'-O-methylcytidine-3'-phosphate
  modified_base 16: mod_base = OTHER; note = 2'-deoxy-2'-fluoroguanosine-3'-phosphate
  modified_base 17: mod_base = OTHER; note = 2'-O-methylguanosine-3'-phosphate
  modified_base 18: mod_base = OTHER; note = 2'-deoxy-2'-fluoroguanosine-3'-phosphate
  modified_base 19: mod_base = OTHER; note = 2'-O-methyladenosine-3'-phosphate
  modified_base 20: mod_base = OTHER; note = 2'-deoxy-2'-fluorouridine-3'-phosphate
  modified_base 21: mod_base = OTHER; note = 2'-O-methyluridine-3'-phosphorothioate
  modified_base 22: mod_base = OTHER; note = 2'-deoxy-2'-fluoroguanosine-3'-phosphorothioate
  modified_base 23: mod_base = OTHER; note = 2'-O-methylcytidine
aaatctttgttttccgggattgc

SEQ ID NO: 1170 - RNA, 23 nt, synthetic construct
  source 1..23: mol_type = other RNA
  modified_base 1: mod_base = OTHER; note = 2'-O-methyluridine-3'-phosphate
  modified_base 2: mod_base = OTHER; note = 2'-deoxy-2'-fluorouridine-3'-phosphate
  modified_base 3: mod_base = OTHER; note = 2'-O-methyluridine-3'-phosphate
  modified_base 4: mod_base = OTHER; note = 2'-deoxy-2'-fluoroguanosine-3'-phosphate
  modified_base 5: mod_base = OTHER; note = 2'-O-methylcytidine-3'-phosphate
  modified_base 6: mod_base = OTHER; note = 2'-deoxy-2'-fluorouridine-3'-phosphate
  modified_base 7: mod_base = OTHER; note = 2'-O-methyluridine-3'-phosphate
  modified_base 8: mod_base = OTHER; note = 2'-deoxy-2'-fluorouridine-3'-phosphate
  modified_base 9: mod_base = OTHER; note = 2'-O-methylguanosine-3'-phosphate
  modified_base 10: mod_base = OTHER; note = 2'-deoxy-2'-fluorouridine-3'-phosphate
  modified_base 11: mod_base = OTHER; note = 2'-O-methylguanosine-3'-phosphate
  modified_base 12: mod_base = OTHER; note = 2'-O-methyladenosine-3'-phosphate
  modified_base 13: mod_base = OTHER; note = 2'-O-methyluridine-3'-phosphate
  modified_base 14: mod_base = OTHER; note = 2'-deoxy-2'-fluorocytidine-3'-phosphate
  modified_base 15: mod_base = OTHER; note = 2'-O-methylcytidine-3'-phosphate
  modified_base 16: mod_base = OTHER; note = 2'-deoxy-2'-fluorocytidine-3'-phosphate
  modified_base 17: mod_base = OTHER; note = 2'-O-methyladenosine-3'-phosphate
  modified_base 18: mod_base = OTHER; note = 2'-deoxy-2'-fluoroadenosine-3'-phosphate
  modified_base 19: mod_base = OTHER; note = 2'-O-methylguanosine-3'-phosphate
  modified_base 20: mod_base = OTHER; note = 2'-deoxy-2'-fluorouridine-3'-phosphate
  modified_base 21: mod_base = OTHER; note = 2'-O-methyladenosine-3'-phosphorothioate
  modified_base 22: mod_base = OTHER; note = 2'-deoxy-2'-fluoroguanosine-3'-phosphorothioate
  modified_base 23: mod_base = OTHER; note = 2'-O-methyladenosine
tttgctttgtgatcccaagtaga

SEQ ID NO: 1171 - RNA, 23 nt, synthetic construct
  source 1..23: mol_type = other RNA
  modified_base 1: mod_base = OTHER; note = 2'-O-methyluridine-3'-phosphate
  modified_base 2: mod_base = OTHER; note = 2'-deoxy-2'-fluorouridine-3'-phosphate
  modified_base 3: mod_base = OTHER; note = 2'-O-methyladenosine-3'-phosphate
  modified_base 4: mod_base = OTHER; note = 2'-deoxy-2'-fluorouridine-3'-phosphate
  modified_base 5: mod_base = OTHER; note = 2'-O-methyladenosine-3'-phosphate
  modified_base 6: mod_base = OTHER; note = 2'-deoxy-2'-fluorouridine-3'-phosphate
  modified_base 7: mod_base = OTHER; note = 2'-O-methyluridine-3'-phosphate
  modified_base 8: mod_base = OTHER; note = 2'-deoxy-2'-fluorouridine-3'-phosphate
  modified_base 9: mod_base = OTHER; note = 2'-O-methyladenosine-3'-phosphate
  modified_base 10: mod_base = OTHER; note = 2'-deoxy-2'-fluorocytidine-3'-phosphate
  modified_base 11: mod_base = OTHER; note = 2'-O-methylcytidine-3'-phosphate
  modified_base 12: mod_base = OTHER; note = 2'-O-methyladenosine-3'-phosphate
  modified_base 13: mod_base = OTHER; note = 2'-O-methyluridine-3'-phosphate
  modified_base 14: mod_base = OTHER; note = 2'-deoxy-2'-fluorouridine-3'-phosphate
  modified_base 15: mod_base = OTHER; note = 2'-O-methyluridine-3'-phosphate
  modified_base 16: mod_base = OTHER; note = 2'-deoxy-2'-fluoroadenosine-3'-phosphate
  modified_base 17: mod_base = OTHER; note = 2'-O-methylguanosine-3'-phosphate
  modified_base 18: mod_base = OTHER; note = 2'-deoxy-2'-fluoroguanosine-3'-phosphate
  modified_base 19: mod_base = OTHER; note = 2'-O-methyluridine-3'-phosphate
  modified_base 20: mod_base = OTHER; note = 2'-deoxy-2'-fluorouridine-3'-phosphate
  modified_base 21: mod_base = OTHER; note = 2'-O-methylguanosine-3'-phosphorothioate
  modified_base 22: mod_base = OTHER; note = 2'-deoxy-2'-fluorouridine-3'-phosphorothioate
  modified_base 23: mod_base = OTHER; note = 2'-O-methyluridine
ttatatttaccatttaggttgtt

SEQ ID NO: 1172 - RNA, 23 nt, synthetic construct
  source 1..23: mol_type = other RNA
  modified_base 1: mod_base = OTHER; note = 2'-O-methyladenosine-3'-phosphate
  modified_base 2: mod_base = OTHER; note = 2'-deoxy-2'-fluoroadenosine-3'-phosphate
  modified_base 3: mod_base = OTHER; note = 2'-O-methyluridine-3'-phosphate
  modified_base 4: mod_base = OTHER; note = 2'-deoxy-2'-fluorouridine-3'-phosphate
  modified_base 5: mod_base = OTHER; note = 2'-O-methyluridine-3'-phosphate
  modified_base 6: mod_base = OTHER; note = 2'-deoxy-2'-fluoroguanosine-3'-phosphate
  modified_base 7: mod_base = OTHER; note = 2'-O-methylcytidine-3'-phosphate
  modified_base 8: mod_base = OTHER; note = 2'-deoxy-2'-fluorocytidine-3'-phosphate
  modified_base 9: mod_base = OTHER; note = 2'-O-methyluridine-3'-phosphate
  modified_base 10: mod_base = OTHER; note = 2'-deoxy-2'-fluorocytidine-3'-phosphate
  modified_base 11: mod_base = OTHER; note = 2'-O-methyladenosine-3'-phosphate
  modified_base 12: mod_base = OTHER; note = 2'-O-methylguanosine-3'-phosphate
  modified_base 13: mod_base = OTHER; note = 2'-O-methyluridine-3'-phosphate
  modified_base 14: mod_base = OTHER; note = 2'-deoxy-2'-fluorouridine-3'-phosphate
  modified_base 15: mod_base = OTHER; note = 2'-O-methylcytidine-3'-phosphate
  modified_base 16: mod_base = OTHER; note = 2'-deoxy-2'-fluoroadenosine-3'-phosphate
  modified_base 17: mod_base = OTHER; note = 2'-O-methyluridine-3'-phosphate
  modified_base 18: mod_base = OTHER; note = 2'-deoxy-2'-fluorouridine-3'-phosphate
  modified_base 19: mod_base = OTHER; note = 2'-O-methylcytidine-3'-phosphate
  modified_base 20: mod_base = OTHER; note = 2'-deoxy-2'-fluoroadenosine-3'-phosphate
  modified_base 21: mod_base = OTHER; note = 2'-O-methyladenosine-3'-phosphorothioate
  modified_base 22: mod_base = OTHER; note = 2'-deoxy-2'-fluoroadenosine-3'-phosphorothioate
  modified_base 23: mod_base = OTHER; note = 2'-O-methylguanosine
aatttgcctcagttcattcaaag

SEQ ID NO: 1173 - RNA, 23 nt, synthetic construct
  source 1..23: mol_type = other RNA
  modified_base 1: mod_base = OTHER; note = 2'-O-methyluridine-3'-phosphate
  modified_base 2: mod_base = OTHER; note = 2'-deoxy-2'-fluorocytidine-3'-phosphate
  modified_base 3: mod_base = OTHER; note = 2'-O-methylcytidine-3'-phosphate
  modified_base 4: mod_base = OTHER; note = 2'-deoxy-2'-fluorouridine-3'-phosphate
  modified_base 5: mod_base = OTHER; note = 2'-O-methyluridine-3'-phosphate
  modified_base 6: mod_base = OTHER; note = 2'-deoxy-2'-fluorouridine-3'-phosphate
  modified_base 7: mod_base = OTHER; note = 2'-O-methyluridine-3'-phosphate
  modified_base 8: mod_base = OTHER; note = 2'-deoxy-2'-fluoroadenosine-3'-phosphate
  modified_base 9: mod_base = OTHER; note = 2'-O-methyladenosine-3'-phosphate
  modified_base 10: mod_base = OTHER; note = 2'-deoxy-2'-fluoroadenosine-3'-phosphate
  modified_base 11: mod_base = OTHER; note = 2'-O-methyluridine-3'-phosphate
  modified_base 12: mod_base = OTHER; note = 2'-O-methyluridine-3'-phosphate
  modified_base 13: mod_base = OTHER; note = 2'-O-methyluridine-3'-phosphate
  modified_base 14: mod_base = OTHER; note = 2'-deoxy-2'-fluoroguanosine-3'-phosphate
  modified_base 15: mod_base = OTHER; note = 2'-O-methylcytidine-3'-phosphate
  modified_base 16: mod_base = OTHER; note = 2'-deoxy-2'-fluorocytidine-3'-phosphate
  modified_base 17: mod_base = OTHER; note = 2'-O-methyluridine-3'-phosphate
  modified_base 18: mod_base = OTHER; note = 2'-deoxy-2'-fluorocytidine-3'-phosphate
  modified_base 19: mod_base = OTHER; note = 2'-O-methyladenosine-3'-phosphate
  modified_base 20: mod_base = OTHER; note = 2'-deoxy-2'-fluoroguanosine-3'-phosphate
  modified_base 21: mod_base = OTHER; note = 2'-O-methyluridine-3'-phosphorothioate
  modified_base 22: mod_base = OTHER; note = 2'-deoxy-2'-fluorouridine-3'-phosphorothioate
  modified_base 23: mod_base = OTHER; note = 2'-O-methylcytidine
tccttttaaatttgcctcagttc

SEQ ID NO: 1174 - RNA, 23 nt, synthetic construct
  source 1..23: mol_type = other RNA
  modified_base 1: mod_base = OTHER; note = 2'-O-methyluridine-3'-phosphate
  modified_base 2: mod_base = OTHER; note = 2'-deoxy-2'-fluoroadenosine-3'-phosphate
  modified_base 3: mod_base = OTHER; note = 2'-O-methylcytidine-3'-phosphate
  modified_base 4: mod_base = OTHER; note = 2'-deoxy-2'-fluoroadenosine-3'-phosphate
  modified_base 5: mod_base = OTHER; note = 2'-O-methylguanosine-3'-phosphate
  modified_base 6: mod_base = OTHER; note = 2'-deoxy-2'-fluoroadenosine-3'-phosphate
  modified_base 7: mod_base = OTHER; note = 2'-O-methyluridine-3'-phosphate
  modified_base 8: mod_base = OTHER; note = 2'-deoxy-2'-fluorouridine-3'-phosphate
  modified_base 9: mod_base = OTHER; note = 2'-O-methyluridine-3'-phosphate
  modified_base 10: mod_base = OTHER; note = 2'-deoxy-2'-fluorouridine-3'-phosphate
  modified_base 11: mod_base = OTHER; note = 2'-O-methyluridine-3'-phosphate
  modified_base 12: mod_base = OTHER; note = 2'-O-methyladenosine-3'-phosphate
  modified_base 13: mod_base = OTHER; note = 2'-O-methylcytidine-3'-phosphate
  modified_base 14: mod_base = OTHER; note = 2'-deoxy-2'-fluoroadenosine-3'-phosphate
  modified_base 15: mod_base = OTHER; note = 2'-O-methylcytidine-3'-phosphate
  modified_base 16: mod_base = OTHER; note = 2'-deoxy-2'-fluoroadenosine-3'-phosphate
  modified_base 17: mod_base = OTHER; note = 2'-O-methyluridine-3'-phosphate
  modified_base 18: mod_base = OTHER; note = 2'-deoxy-2'-fluoroadenosine-3'-phosphate
  modified_base 19: mod_base = OTHER; note = 2'-O-methylcytidine-3'-phosphate
  modified_base 20: mod_base = OTHER; note = 2'-deoxy-2'-fluorouridine-3'-phosphate
  modified_base 21: mod_base = OTHER; note = 2'-O-methylcytidine-3'-phosphorothioate
  modified_base 22: mod_base = OTHER; note = 2'-deoxy-2'-fluorouridine-3'-phosphorothioate
  modified_base 23: mod_base = OTHER; note = 2'-O-methylguanosine
tacagatttttacacatactctg

SEQ ID NO: 1175 - RNA, 23 nt, synthetic construct
  source 1..23: mol_type = other RNA
  modified_base 1: mod_base = OTHER; note = 2'-O-methyluridine-3'-phosphate
  modified_base 2: mod_base = OTHER; note = 2'-deoxy-2'-fluorouridine-3'-phosphate
  modified_base 3: mod_base = OTHER; note = 2'-O-methyluridine-3'-phosphate
  modified_base 4: mod_base = OTHER; note = 2'-deoxy-2'-fluorouridine-3'-phosphate
  modified_base 5: mod_base = OTHER; note = 2'-O-methylguanosine-3'-phosphate
  modified_base 6: mod_base = OTHER; note = 2'-deoxy-2'-fluorocytidine-3'-phosphate
  modified_base 7: mod_base = OTHER; note = 2'-O-methyluridine-3'-phosphate
  modified_base 8: mod_base = OTHER; note = 2'-deoxy-2'-fluorouridine-3'-phosphate
  modified_base 9: mod_base = OTHER; note = 2'-O-methyluridine-3'-phosphate
  modified_base 10: mod_base = OTHER; note = 2'-deoxy-2'-fluoroguanosine-3'-phosphate
  modified_base 11: mod_base = OTHER; note = 2'-O-methyluridine-3'-phosphate
  modified_base 12: mod_base = OTHER; note = 2'-O-methylguanosine-3'-phosphate
  modified_base 13: mod_base = OTHER; note = 2'-O-methyladenosine-3'-phosphate
  modified_base 14: mod_base = OTHER; note = 2'-deoxy-2'-fluorouridine-3'-phosphate
  modified_base 15: mod_base = OTHER; note = 2'-O-methylcytidine-3'-phosphate
  modified_base 16: mod_base = OTHER; note = 2'-deoxy-2'-fluorocytidine-3'-phosphate
  modified_base 17: mod_base = OTHER; note = 2'-O-methylcytidine-3'-phosphate
  modified_base 18: mod_base = OTHER; note = 2'-deoxy-2'-fluoroadenosine-3'-phosphate
  modified_base 19: mod_base = OTHER; note = 2'-O-methyladenosine-3'-phosphate
  modified_base 20: mod_base = OTHER; note = 2'-deoxy-2'-fluoroguanosine-3'-phosphate
  modified_base 21: mod_base = OTHER; note = 2'-O-methyluridine-3'-phosphorothioate
  modified_base 22: mod_base = OTHER; note = 2'-deoxy-2'-fluoroadenosine-3'-phosphorothioate
  modified_base 23: mod_base = OTHER; note = 2'-O-methylguanosine
ttttgctttgtgatcccaagtag

SEQ ID NO: 1176 - RNA, 23 nt, synthetic construct
  source 1..23: mol_type = other RNA
  modified_base 1: mod_base = OTHER; note = 2'-O-methyluridine-3'-phosphate
  modified_base 2: mod_base = OTHER; note = 2'-deoxy-2'-fluorouridine-3'-phosphate
  modified_base 3: mod_base = OTHER; note = 2'-O-methylguanosine-3'-phosphate
  modified_base 4: mod_base = OTHER; note = 2'-deoxy-2'-fluoroguanosine-3'-phosphate
  modified_base 5: mod_base = OTHER; note = 2'-O-methyluridine-3'-phosphate
  modified_base 6: mod_base = OTHER; note = 2'-deoxy-2'-fluorouridine-3'-phosphate
  modified_base 7: mod_base = OTHER; note = 2'-O-methyluridine-3'-phosphate
  modified_base 8: mod_base = OTHER; note = 2'-deoxy-2'-fluoroguanosine-3'-phosphate
  modified_base 9: mod_base = OTHER; note = 2'-O-methyluridine-3'-phosphate
  modified_base 10: mod_base = OTHER; note = 2'-deoxy-2'-fluorouridine-3'-phosphate
  modified_base 11: mod_base = OTHER; note = 2'-O-methyladenosine-3'-phosphate
  modified_base 12: mod_base = OTHER; note = 2'-O-methyluridine-3'-phosphate
  modified_base 13: mod_base = OTHER; note = 2'-O-methyladenosine-3'-phosphate
  modified_base 14: mod_base = OTHER; note = 2'-deoxy-2'-fluorouridine-3'-phosphate
  modified_base 15: mod_base = OTHER; note = 2'-O-methyluridine-3'-phosphate
  modified_base 16: mod_base = OTHER; note = 2'-deoxy-2'-fluorouridine-3'-phosphate
  modified_base 17: mod_base = OTHER; note = 2'-O-methyladenosine-3'-phosphate
  modified_base 18: mod_base = OTHER; note = 2'-deoxy-2'-fluorocytidine-3'-phosphate
  modified_base 19: mod_base = OTHER; note = 2'-O-methylcytidine-3'-phosphate
  modified_base 20: mod_base = OTHER; note = 2'-deoxy-2'-fluoroadenosine-3'-phosphate
  modified_base 21: mod_base = OTHER; note = 2'-O-methyluridine-3'-phosphorothioate
  modified_base 22: mod_base = OTHER; note = 2'-deoxy-2'-fluorouridine-3'-phosphorothioate
  modified_base 23: mod_base = OTHER; note = 2'-O-methyluridine
ttggtttgttatatttaccattt

SEQ ID NO: 1177 - RNA, 23 nt, synthetic construct
  source 1..23: mol_type = other RNA
  modified_base 1: mod_base = OTHER; note = 2'-O-methyladenosine-3'-phosphate
  modified_base 2: mod_base = OTHER; note = 2'-deoxy-2'-fluoroadenosine-3'-phosphate
  modified_base 3: mod_base = OTHER; note = 2'-O-methyladenosine-3'-phosphate
  modified_base 4: mod_base = OTHER; note = 2'-deoxy-2'-fluorouridine-3'-phosphate
  modified_base 5: mod_base = OTHER; note = 2'-O-methyluridine-3'-phosphate
  modified_base 6: mod_base = OTHER; note = 2'-deoxy-2'-fluorouridine-3'-phosphate
  modified_base 7: mod_base = OTHER; note = 2'-O-methylguanosine-3'-phosphate
  modified_base 8: mod_base = OTHER; note = 2'-deoxy-2'-fluorocytidine-3'-phosphate
  modified_base 9: mod_base = OTHER; note = 2'-O-methylcytidine-3'-phosphate
  modified_base 10: mod_base = OTHER; note = 2'-deoxy-2'-fluorouridine-3'-phosphate
  modified_base 11: mod_base = OTHER; note = 2'-O-methylcytidine-3'-phosphate
  modified_base 12: mod_base = OTHER; note = 2'-O-methyladenosine-3'-phosphate
  modified_base 13: mod_base = OTHER; note = 2'-O-methylguanosine-3'-phosphate
  modified_base 14: mod_base = OTHER; note = 2'-deoxy-2'-fluorouridine-3'-phosphate
  modified_base 15: mod_base = OTHER; note = 2'-O-methyluridine-3'-phosphate
  modified_base 16: mod_base = OTHER; note = 2'-deoxy-2'-fluorocytidine-3'-phosphate
  modified_base 17: mod_base = OTHER; note = 2'-O-methyladenosine-3'-phosphate
  modified_base 18: mod_base = OTHER; note = 2'-deoxy-2'-fluorouridine-3'-phosphate
  modified_base 19: mod_base = OTHER; note = 2'-O-methyluridine-3'-phosphate
  modified_base 20: mod_base = OTHER; note = 2'-deoxy-2'-fluorocytidine-3'-phosphate
  modified_base 21: mod_base = OTHER; note = 2'-O-methyladenosine-3'-phosphorothioate
  modified_base 22: mod_base = OTHER; note = 2'-deoxy-2'-fluoroadenosine-3'-phosphorothioate
  modified_base 23: mod_base = OTHER; note = 2'-O-methyladenosine
aaatttgcctcagttcattcaaa

SEQ ID NO: 1178 - RNA, 23 nt, synthetic construct
  source 1..23: mol_type = other RNA
  modified_base 1: mod_base = OTHER; note = 2'-O-methyluridine-3'-phosphate
  modified_base 2: mod_base = OTHER; note = 2'-deoxy-2'-fluoroguanosine-3'-phosphate
  modified_base 3: mod_base = OTHER; note = 2'-O-methylcytidine-3'-phosphate
  modified_base 4: mod_base = OTHER; note = 2'-deoxy-2'-fluorocytidine-3'-phosphate
  modified_base 5: mod_base = OTHER; note = 2'-O-methyluridine-3'-phosphate
  modified_base 6: mod_base = OTHER; note = 2'-deoxy-2'-fluorouridine-3'-phosphate
  modified_base 7: mod_base = OTHER; note = 2'-O-methyluridine-3'-phosphate
  modified_base 8: mod_base = OTHER; note = 2'-deoxy-2'-fluorouridine-3'-phosphate
  modified_base 9: mod_base = OTHER; note = 2'-O-methyladenosine-3'-phosphate
  modified_base 10: mod_base = OTHER; note = 2'-deoxy-2'-fluoroadenosine-3'-phosphate
  modified_base 11: mod_base = OTHER; note = 2'-O-methyladenosine-3'-phosphate
  modified_base 12: mod_base = OTHER; note = 2'-O-methyluridine-3'-phosphate
  modified_base 13: mod_base = OTHER; note = 2'-O-methyluridine-3'-phosphate
  modified_base 14: mod_base = OTHER; note = 2'-deoxy-2'-fluorouridine-3'-phosphate
  modified_base 15: mod_base = OTHER; note = 2'-O-methylguanosine-3'-phosphate
  modified_base 16: mod_base = OTHER; note = 2'-deoxy-2'-fluorocytidine-3'-phosphate
  modified_base 17: mod_base = OTHER; note = 2'-O-methylcytidine-3'-phosphate
  modified_base 18: mod_base = OTHER; note = 2'-deoxy-2'-fluorouridine-3'-phosphate
  modified_base 19: mod_base = OTHER; note = 2'-O-methylcytidine-3'-phosphate
  modified_base 20: mod_base = OTHER; note = 2'-deoxy-2'-fluoroadenosine-3'-phosphate
  modified_base 21: mod_base = OTHER; note = 2'-O-methylguanosine-3'-phosphorothioate
  modified_base 22: mod_base = OTHER; note = 2'-deoxy-2'-fluorouridine-3'-phosphorothioate
  modified_base 23: mod_base = OTHER; note = 2'-O-methyluridine
tgccttttaaatttgcctcagtt

SEQ ID NO: 1179 - RNA, 23 nt, synthetic construct
  source 1..23: mol_type = other RNA
  modified_base 1: mod_base = OTHER; note = 2'-O-methyluridine-3'-phosphate
  modified_base 2: mod_base = OTHER; note = 2'-deoxy-2'-fluorouridine-3'-phosphate
  modified_base 3: mod_base = OTHER; note = 2'-O-methyladenosine-3'-phosphate
  modified_base 4: mod_base = OTHER; note = 2'-deoxy-2'-fluorocytidine-3'-phosphate
  modified_base 5: mod_base = OTHER; note = 2'-O-methyladenosine-3'-phosphate
  modified_base 6: mod_base = OTHER; note = 2'-deoxy-2'-fluoroguanosine-3'-phosphate
  modified_base 7: mod_base = OTHER; note = 2'-O-methyladenosine-3'-phosphate
  modified_base 8: mod_base = OTHER; note = 2'-deoxy-2'-fluorouridine-3'-phosphate
  modified_base 9: mod_base = OTHER; note = 2'-O-methyluridine-3'-phosphate
  modified_base 10: mod_base = OTHER; note = 2'-deoxy-2'-fluorouridine-3'-phosphate
  modified_base 11: mod_base = OTHER; note = 2'-O-methyluridine-3'-phosphate
  modified_base 12: mod_base = OTHER; note = 2'-O-methyluridine-3'-phosphate
  modified_base 13: mod_base = OTHER; note = 2'-O-methyladenosine-3'-phosphate
  modified_base 14: mod_base = OTHER; note = 2'-deoxy-2'-fluorocytidine-3'-phosphate
  modified_base 15: mod_base = OTHER; note = 2'-O-methyladenosine-3'-phosphate
  modified_base 16: mod_base = OTHER; note = 2'-deoxy-2'-fluorocytidine-3'-phosphate
  modified_base 17: mod_base = OTHER; note = 2'-O-methyladenosine-3'-phosphate
  modified_base 18: mod_base = OTHER; note = 2'-deoxy-2'-fluorouridine-3'-phosphate
  modified_base 19: mod_base = OTHER; note = 2'-O-methyladenosine-3'-phosphate
  modified_base 20: mod_base = OTHER; note = 2'-deoxy-2'-fluorocytidine-3'-phosphate
  modified_base 21: mod_base = OTHER; note = 2'-O-methyluridine-3'-phosphorothioate
  modified_base 22: mod_base = OTHER; note = 2'-deoxy-2'-fluorocytidine-3'-phosphorothioate
  modified_base 23: mod_base = OTHER; note = 2'-O-methyluridine
ttacagatttttacacatactct

SEQ ID NO: 1180 - RNA, 23 nt, synthetic construct
  source 1..23: mol_type = other RNA
  modified_base 1: mod_base = OTHER; note = 2'-O-methyladenosine-3'-phosphate
  modified_base 2: mod_base = OTHER; note = 2'-deoxy-2'-fluoroadenosine-3'-phosphate
  modified_base 3: mod_base = OTHER; note = 2'-O-methyladenosine-3'-phosphate
  modified_base 4: mod_base = OTHER; note = 2'-deoxy-2'-fluorocytidine-3'-phosphate
  modified_base 5: mod_base = OTHER; note = 2'-O-methyladenosine-3'-phosphate
  modified_base 6: mod_base = OTHER; note = 2'-deoxy-2'-fluorocytidine-3'-phosphate
  modified_base 7: mod_base = OTHER; note = 2'-O-methylcytidine-3'-phosphate
  modified_base 8: mod_base = OTHER; note = 2'-deoxy-2'-fluoroadenosine-3'-phosphate
  modified_base 9: mod_base = OTHER; note = 2'-O-methyladenosine-3'-phosphate
  modified_base 10: mod_base = OTHER; note = 2'-deoxy-2'-fluoroadenosine-3'-phosphate
  modified_base 11: mod_base = OTHER; note = 2'-O-methyluridine-3'-phosphate
  modified_base 12: mod_base = OTHER; note = 2'-O-methylcytidine-3'-phosphate
  modified_base 13: mod_base = OTHER; note = 2'-O-methyluridine-3'-phosphate
  modified_base 14: mod_base = OTHER; note = 2'-deoxy-2'-fluorouridine-3'-phosphate
  modified_base 15: mod_base = OTHER; note = 2'-O-methyluridine-3'-phosphate
  modified_base 16: mod_base = OTHER; note = 2'-deoxy-2'-fluoroguanosine-3'-phosphate
  modified_base 17: mod_base = OTHER; note = 2'-O-methyluridine-3'-phosphate
  modified_base 18: mod_base = OTHER; note = 2'-deoxy-2'-fluorouridine-3'-phosphate
  modified_base 19: mod_base = OTHER; note = 2'-O-methyluridine-3'-phosphate
  modified_base 20: mod_base = OTHER; note = 2'-deoxy-2'-fluorouridine-3'-phosphate
  modified_base 21: mod_base = OTHER; note = 2'-O-methylcytidine-3'-phosphorothioate
  modified_base 22: mod_base = OTHER; note = 2'-deoxy-2'-fluorocytidine-3'-phosphorothioate
  modified_base 23: mod_base = OTHER; note = 2'-O-methylguanosine
aaacaccaaatctttgttttccg

SEQ ID NO: 1181 - RNA, 23 nt, synthetic construct
  source 1..23: mol_type = other RNA
  modified_base 1: mod_base = OTHER; note = 2'-O-methyluridine-3'-phosphate
  modified_base 2: mod_base = OTHER; note = 2'-deoxy-2'-fluorouridine-3'-phosphate
  modified_base 3: mod_base = OTHER; note = 2'-O-methyladenosine-3'-phosphate
  modified_base 4: mod_base = OTHER; note = 2'-deoxy-2'-fluoroguanosine-3'-phosphate
  modified_base 5: mod_base = OTHER; note = 2'-O-methylguanosine-3'-phosphate
  modified_base 6: mod_base = OTHER; note = 2'-deoxy-2'-fluorouridine-3'-phosphate
  modified_base 7: mod_base = OTHER; note = 2'-O-methyluridine-3'-phosphate
  modified_base 8: mod_base = OTHER; note = 2'-deoxy-2'-fluoroguanosine-3'-phosphate
  modified_base 9: mod_base = OTHER; note = 2'-O-methyluridine-3'-phosphate
  modified_base 10: mod_base = OTHER; note = 2'-deoxy-2'-fluorouridine-3'-phosphate
  modified_base 11: mod_base = OTHER; note = 2'-O-methyluridine-3'-phosphate
  modified_base 12: mod_base = OTHER; note = 2'-O-methyluridine-3'-phosphate
  modified_base 13: mod_base = OTHER; note = 2'-O-methylcytidine-3'-phosphate
  modified_base 14: mod_base = OTHER; note = 2'-deoxy-2'-fluorouridine-3'-phosphate
  modified_base 15: mod_base = OTHER; note = 2'-O-methylcytidine-3'-phosphate
  modified_base 16: mod_base = OTHER; note = 2'-deoxy-2'-fluorocytidine-3'-phosphate
  modified_base 17: mod_base = OTHER; note = 2'-O-methyladenosine-3'-phosphate
  modified_base 18: mod_base = OTHER; note = 2'-deoxy-2'-fluorocytidine-3'-phosphate
  modified_base 19: mod_base = OTHER; note = 2'-O-methyladenosine-3'-phosphate
  modified_base 20: mod_base = OTHER; note = 2'-deoxy-2'-fluorocytidine-3'-phosphate
  modified_base 21: mod_base = OTHER; note = 2'-O-methyluridine-3'-phosphorothioate
  modified_base 22: mod_base = OTHER; note = 2'-deoxy-2'-fluorocytidine-3'-phosphorothioate
  modified_base 23: mod_base = OTHER; note = 2'-O-methyladenosine
ttaggttgttttctccacactca

SEQ ID NO: 1182 - RNA, 23 nt, synthetic construct
  source 1..23: mol_type = other RNA
  modified_base 1: mod_base = OTHER; note = 2'-O-methyluridine-3'-phosphate
  modified_base 2: mod_base = OTHER; note = 2'-deoxy-2'-fluoroadenosine-3'-phosphate
  modified_base 3: mod_base = OTHER; note = 2'-O-methyluridine-3'-phosphate
  modified_base 4: mod_base = OTHER; note = 2'-deoxy-2'-fluoroadenosine-3'-phosphate
  modified_base 5: mod_base = OTHER; note = 2'-O-methyladenosine-3'-phosphate
  modified_base 6: mod_base = OTHER; note = 2'-deoxy-2'-fluorocytidine-3'-phosphate
  modified_base 7: mod_base = OTHER; note = 2'-O-methylcytidine-3'-phosphate
  modified_base 8: mod_base = OTHER; note = 2'-deoxy-2'-fluorouridine-3'-phosphate
  modified_base 9: mod_base = OTHER; note = 2'-O-methyluridine-3'-phosphate
  modified_base 10: mod_base = OTHER; note = 2'-deoxy-2'-fluorocytidine-3'-phosphate
  modified_base 11: mod_base = OTHER; note = 2'-O-methylcytidine-3'-phosphate
  modified_base 12: mod_base = OTHER; note = 2'-O-methyladenosine-3'-phosphate
  modified_base 13: mod_base = OTHER; note = 2'-O-methyluridine-3'-phosphate
  modified_base 14: mod_base = OTHER; note = 2'-deoxy-2'-fluorouridine-3'-phosphate
  modified_base 15: mod_base = OTHER; note = 2'-O-methyluridine-3'-phosphate
  modified_base 16: mod_base = OTHER; note = 2'-deoxy-2'-fluorouridine-3'-phosphate
  modified_base 17: mod_base = OTHER; note = 2'-O-methylguanosine-3'-phosphate
  modified_base 18: mod_base = OTHER; note = 2'-deoxy-2'-fluoroadenosine-3'-phosphate
  modified_base 19: mod_base = OTHER; note = 2'-O-methylguanosine-3'-phosphate
  modified_base 20: mod_base = OTHER; note = 2'-deoxy-2'-fluoroadenosine-3'-phosphate
  modified_base 21: mod_base = OTHER; note = 2'-O-methylcytidine-3'-phosphorothioate
  modified_base 22: mod_base = OTHER; note = 2'-deoxy-2'-fluorouridine-3'-phosphorothioate
  modified_base 23: mod_base = OTHER; note = 2'-O-methyluridine
tataaccttccattttgagactt

SEQ ID NO: 1183 - RNA, 23 nt, synthetic construct
  source 1..23: mol_type = other RNA
  modified_base 1: mod_base = OTHER; note = 2'-O-methyluridine-3'-phosphate
  modified_base 2: mod_base = OTHER; note = 2'-deoxy-2'-fluoroadenosine-3'-phosphate
  modified_base 3: mod_base = OTHER; note = 2'-O-methyladenosine-3'-phosphate
  modified_base 4: mod_base = OTHER; note = 2'-deoxy-2'-fluoroadenosine-3'-phosphate
  modified_base 5: mod_base = OTHER; note = 2'-O-methyluridine-3'-phosphate
  modified_base 6: mod_base = OTHER; note = 2'-deoxy-2'-fluorouridine-3'-phosphate
  modified_base 7: mod_base = OTHER; note = 2'-O-methyluridine-3'-phosphate
  modified_base 8: mod_base = OTHER; note = 2'-deoxy-2'-fluoroguanosine-3'-phosphate
  modified_base 9: mod_base = OTHER; note = 2'-O-methylcytidine-3'-phosphate
  modified_base 10: mod_base = OTHER; note = 2'-deoxy-2'-fluorocytidine-3'-phosphate
  modified_base 11: mod_base = OTHER; note = 2'-O-methyluridine-3'-phosphate
  modified_base 12: mod_base = OTHER; note = 2'-O-methylcytidine-3'-phosphate
  modified_base 13: mod_base = OTHER; note = 2'-O-methyladenosine-3'-phosphate
  modified_base 14: mod_base = OTHER; note = 2'-deoxy-2'-fluoroguanosine-3'-phosphate
  modified_base 15: mod_base = OTHER; note = 2'-O-methyluridine-3'-phosphate
  modified_base 16: mod_base = OTHER; note = 2'-deoxy-2'-fluorouridine-3'-phosphate
  modified_base 17: mod_base = OTHER; note = 2'-O-methylcytidine-3'-phosphate
  modified_base 18: mod_base = OTHER; note = 2'-deoxy-2'-fluoroadenosine-3'-phosphate
  modified_base 19: mod_base = OTHER; note = 2'-O-methyluridine-3'-phosphate
  modified_base 20: mod_base = OTHER; note = 2'-deoxy-2'-fluorouridine-3'-phosphate
  modified_base 21: mod_base = OTHER; note = 2'-O-methylcytidine-3'-phosphorothioate
  modified_base 22: mod_base = OTHER; note = 2'-deoxy-2'-fluoroadenosine-3'-phosphorothioate
  modified_base 23: mod_base = OTHER; note = 2'-O-methyladenosine
taaatttgcctcagttcattcaa

SEQ ID NO: 1184 - RNA, 23 nt, synthetic construct
  source 1..23: mol_type = other RNA
  modified_base 1: mod_base = OTHER; note = 2'-O-methyluridine-3'-phosphate
  modified_base 2: mod_base = OTHER; note = 2'-deoxy-2'-fluorouridine-3'-phosphate
  modified_base 3: mod_base = OTHER; note = 2'-O-methylguanosine-3'-phosphate
  modified_base 4: mod_base = OTHER; note = 2'-deoxy-2'-fluorocytidine-3'-phosphate
  modified_base 5: mod_base = OTHER; note = 2'-O-methylcytidine-3'-phosphate
  modified_base 6: mod_base = OTHER; note = 2'-deoxy-2'-fluorouridine-3'-phosphate
  modified_base 7: mod_base = OTHER; note = 2'-O-methyluridine-3'-phosphate
  modified_base 8: mod_base = OTHER; note = 2'-deoxy-2'-fluorouridine-3'-phosphate
  modified_base 9: mod_base = OTHER; note = 2'-O-methyluridine-3'-phosphate
  modified_base 10: mod_base = OTHER; note = 2'-deoxy-2'-fluoroadenosine-3'-phosphate
  modified_base 11: mod_base = OTHER; note = 2'-O-methyladenosine-3'-phosphate
  modified_base 12: mod_base = OTHER; note = 2'-O-methyladenosine-3'-phosphate
  modified_base 13: mod_base = OTHER; note = 2'-O-methyluridine-3'-phosphate
  modified_base 14: mod_base = OTHER; note = 2'-deoxy-2'-fluorouridine-3'-phosphate
  modified_base 15: mod_base = OTHER; note = 2'-O-methyluridine-3'-phosphate
  modified_base 16: mod_base = OTHER; note = 2'-deoxy-2'-fluoroguanosine-3'-phosphate
  modified_base 17: mod_base = OTHER; note = 2'-O-methylcytidine-3'-phosphate
  modified_base 18: mod_base = OTHER; note = 2'-deoxy-2'-fluorocytidine-3'-phosphate
  modified_base 19: mod_base = OTHER; note = 2'-O-methyluridine-3'-phosphate
  modified_base 20: mod_base = OTHER; note = 2'-deoxy-2'-fluorocytidine-3'-phosphate
  modified_base 21: mod_base = OTHER; note = 2'-O-methyladenosine-3'-phosphorothioate
  modified_base 22: mod_base = OTHER; note = 2'-deoxy-2'-fluoroguanosine-3'-phosphorothioate
  modified_base 23: mod_base = OTHER; note = 2'-O-methyluridine
ttgccttttaaatttgcctcagt

SEQ ID NO: 1185 - RNA, 23 nt, synthetic construct
  source 1..23: mol_type = other RNA
  modified_base 1: mod_base = OTHER; note = 2'-O-methyladenosine-3'-phosphate
  modified_base 2: mod_base = OTHER; note = 2'-deoxy-2'-fluorouridine-3'-phosphate
  modified_base 3: mod_base = OTHER; note = 2'-O-methyluridine-3'-phosphate
  modified_base 4: mod_base = OTHER; note = 2'-deoxy-2'-fluoroadenosine-3'-phosphate
  modified_base 5: mod_base = OTHER; note = 2'-O-methylcytidine-3'-phosphate
  modified_base 6: mod_base = OTHER; note = 2'-deoxy-2'-fluoroadenosine-3'-phosphate
  modified_base 7: mod_base = OTHER; note = 2'-O-methylguanosine-3'-phosphate
  modified_base 8: mod_base = OTHER; note = 2'-deoxy-2'-fluoroadenosine-3'-phosphate
  modified_base 9: mod_base = OTHER; note = 2'-O-methyluridine-3'-phosphate
  modified_base 10: mod_base = OTHER; note = 2'-deoxy-2'-fluorouridine-3'-phosphate
  modified_base 11: mod_base = OTHER; note = 2'-O-methyluridine-3'-phosphate
  modified_base 12: mod_base = OTHER; note = 2'-O-methyluridine-3'-phosphate
  modified_base 13: mod_base = OTHER; note = 2'-O-methyluridine-3'-phosphate
  modified_base 14: mod_base = OTHER; note = 2'-deoxy-2'-fluoroadenosine-3'-phosphate
  modified_base 15: mod_base = OTHER; note = 2'-O-methylcytidine-3'-phosphate
  modified_base 16: mod_base = OTHER; note = 2'-deoxy-2'-fluoroadenosine-3'-phosphate
  modified_base 17: mod_base = OTHER; note = 2'-O-methylcytidine-3'-phosphate
  modified_base 18: mod_base = OTHER; note = 2'-deoxy-2'-fluoroadenosine-3'-phosphate
  modified_base 19: mod_base = OTHER; note = 2'-O-methyluridine-3'-phosphate
  modified_base 20: mod_base = OTHER; note = 2'-deoxy-2'-fluoroadenosine-3'-phosphate
  modified_base 21: mod_base = OTHER; note = 2'-O-methylcytidine-3'-phosphorothioate
  modified_base 22: mod_base = OTHER; note = 2'-deoxy-2'-fluorouridine-3'-phosphorothioate
  modified_base 23: mod_base = OTHER; note = 2'-O-methylcytidine
attacagatttttacacatactc

SEQ ID NO: 1186 - RNA, 23 nt, synthetic construct
  source 1..23: mol_type = other RNA
  modified_base 1: mod_base = OTHER; note = 2'-O-methyladenosine-3'-phosphate
  modified_base 2: mod_base = OTHER; note = 2'-deoxy-2'-fluoroadenosine-3'-phosphate
  modified_base 3: mod_base = OTHER; note = 2'-O-methyladenosine-3'-phosphate
  modified_base 4: mod_base = OTHER; note = 2'-deoxy-2'-fluoroadenosine-3'-phosphate
  modified_base 5: mod_base = OTHER; note = 2'-O-methylcytidine-3'-phosphate
  modified_base 6: mod_base = OTHER; note = 2'-deoxy-2'-fluoroadenosine-3'-phosphate
  modified_base 7: mod_base = OTHER; note = 2'-O-methylcytidine-3'-phosphate
  modified_base 8: mod_base = OTHER; note = 2'-deoxy-2'-fluorocytidine-3'-phosphate
  modified_base 9: mod_base = OTHER; note = 2'-O-methyladenosine-3'-phosphate
  modified_base 10: mod_base = OTHER; note = 2'-deoxy-2'-fluoroadenosine-3'-phosphate
  modified_base 11: mod_base = OTHER; note = 2'-O-methyladenosine-3'-phosphate
  modified_base 12: mod_base = OTHER; note = 2'-O-methyluridine-3'-phosphate
  modified_base 13: mod_base = OTHER; note = 2'-O-methylcytidine-3'-phosphate
  modified_base 14: mod_base = OTHER; note = 2'-deoxy-2'-fluorouridine-3'-phosphate
  modified_base 15: mod_base = OTHER; note = 2'-O-methyluridine-3'-phosphate
  modified_base 16: mod_base = OTHER; note = 2'-deoxy-2'-fluorouridine-3'-phosphate
  modified_base 17: mod_base = OTHER; note = 2'-O-methylguanosine-3'-phosphate
  modified_base 18: mod_base = OTHER; note = 2'-deoxy-2'-fluorouridine-3'-phosphate
  modified_base 19: mod_base = OTHER; note = 2'-O-methyluridine-3'-phosphate
  modified_base 20: mod_base = OTHER; note = 2'-deoxy-2'-fluorouridine-3'-phosphate
  modified_base 21: mod_base = OTHER; note = 2'-O-methyluridine-3'-phosphorothioate
  modified_base 22: mod_base = OTHER; note = 2'-deoxy-2'-fluorocytidine-3'-phosphorothioate
  modified_base 23: mod_base = OTHER; note = 2'-O-methylcytidine
aaaacaccaaatctttgttttcc

SEQ ID NO: 1187 - RNA, 23 nt, synthetic construct
  source 1..23: mol_type = other RNA
  modified_base 1: mod_base = OTHER; note = 2'-O-methyluridine-3'-phosphate
  modified_base 2: mod_base = OTHER; note = 2'-deoxy-2'-fluorouridine-3'-phosphate
  modified_base 3: mod_base = OTHER; note = 2'-O-methyluridine-3'-phosphate
  modified_base 4: mod_base = OTHER; note = 2'-deoxy-2'-fluoroadenosine-3'-phosphate
  modified_base 5: mod_base = OTHER; note = 2'-O-methylguanosine-3'-phosphate
  modified_base 6: mod_base = OTHER; note = 2'-deoxy-2'-fluoroguanosine-3'-phosphate
  modified_base 7: mod_base = OTHER; note = 2'-O-methyluridine-3'-phosphate
  modified_base 8: mod_base = OTHER; note = 2'-deoxy-2'-fluorouridine-3'-phosphate
  modified_base 9: mod_base = OTHER; note = 2'-O-methylguanosine-3'-phosphate
  modified_base 10: mod_base = OTHER; note = 2'-deoxy-2'-fluorouridine-3'-phosphate
  modified_base 11: mod_base = OTHER; note = 2'-O-methyluridine-3'-phosphate
  modified_base 12: mod_base = OTHER; note = 2'-O-methyluridine-3'-phosphate
  modified_base 13: mod_base = OTHER; note = 2'-O-methyluridine-3'-phosphate
  modified_base 14: mod_base = OTHER; note = 2'-deoxy-2'-fluorocytidine-3'-phosphate
  modified_base 15: mod_base = OTHER; note = 2'-O-methyluridine-3'-phosphate
  modified_base 16: mod_base = OTHER; note = 2'-deoxy-2'-fluorocytidine-3'-phosphate
  modified_base 17: mod_base = OTHER; note = 2'-O-methylcytidine-3'-phosphate
  modified_base 18: mod_base = OTHER; note = 2'-deoxy-2'-fluoroadenosine-3'-phosphate
  modified_base 19: mod_base = OTHER; note = 2'-O-methylcytidine-3'-phosphate
  modified_base 20: mod_base = OTHER; note = 2'-deoxy-2'-fluoroadenosine-3'-phosphate
  modified_base 21: mod_base = OTHER; note = 2'-O-methylcytidine-3'-phosphorothioate
  modified_base 22: mod_base = OTHER; note = 2'-deoxy-2'-fluorouridine-3'-phosphorothioate
  modified_base 23: mod_base = OTHER; note = 2'-O-methylcytidine
tttaggttgttttctccacactc

SEQ ID NO: 1188 - RNA, 23 nt, synthetic construct
  source 1..23: mol_type = other RNA
  modified_base 1: mod_base = OTHER; note = 2'-O-methyluridine-3'-phosphate
  modified_base 2: mod_base = OTHER; note = 2'-deoxy-2'-fluorouridine-3'-phosphate
  modified_base 3: mod_base = OTHER; note = 2'-O-methyladenosine-3'-phosphate
  modified_base 4: mod_base = OTHER; note = 2'-deoxy-2'-fluorouridine-3'-phosphate
  modified_base 5: mod_base = OTHER; note = 2'-O-methyladenosine-3'-phosphate
  modified_base 6: mod_base = OTHER; note = 2'-deoxy-2'-fluoroguanosine-3'-phosphate
  modified_base 7: mod_base = OTHER; note = 2'-O-methyladenosine-3'-phosphate
  modified_base 8: mod_base = OTHER; note = 2'-deoxy-2'-fluoroguanosine-3'-phosphate
  modified_base 9: mod_base = OTHER; note = 2'-O-methyluridine-3'-phosphate
  modified_base 10: mod_base = OTHER; note = 2'-deoxy-2'-fluoroadenosine-3'-phosphate
  modified_base 11: mod_base = OTHER; note = 2'-O-methyluridine-3'-phosphate
  modified_base 12: mod_base = OTHER; note = 2'-O-methyladenosine-3'-phosphate
  modified_base 13: mod_base = OTHER; note = 2'-O-methyladenosine-3'-phosphate
  modified_base 14: mod_base = OTHER; note = 2'-deoxy-2'-fluorocytidine-3'-phosphate
  modified_base 15: mod_base = OTHER; note = 2'-O-methylcytidine-3'-phosphate
  modified_base 16: mod_base = OTHER; note = 2'-deoxy-2'-fluorouridine-3'-phosphate
  modified_base 17: mod_base = OTHER; note = 2'-O-methyluridine-3'-phosphate
  modified_base 18: mod_base = OTHER; note = 2'-deoxy-2'-fluorocytidine-3'-phosphate
  modified_base 19: mod_base = OTHER; note = 2'-O-methylcytidine-3'-phosphate
  modified_base 20: mod_base = OTHER; note = 2'-deoxy-2'-fluoroadenosine-3'-phosphate
  modified_base 21: mod_base = OTHER; note = 2'-O-methyluridine-3'-phosphorothioate
  modified_base 22: mod_base = OTHER; note = 2'-deoxy-2'-fluorouridine-3'-phosphorothioate
  modified_base 23: mod_base = OTHER; note = 2'-O-methyluridine
ttatagagtataaccttccattt

SEQ ID NO: 1189 - RNA, 23 nt, synthetic construct
  source 1..23: mol_type = other RNA
  modified_base 1: mod_base = OTHER; note = 2'-O-methyluridine-3'-phosphate
  modified_base 2: mod_base = OTHER; note = 2'-deoxy-2'-fluorouridine-3'-phosphate
  modified_base 3: mod_base = OTHER; note = 2'-O-methyladenosine-3'-phosphate
  modified_base 4: mod_base = OTHER; note = 2'-deoxy-2'-fluoroadenosine-3'-phosphate
  modified_base 5: mod_base = OTHER; note = 2'-O-methyladenosine-3'-phosphate
  modified_base 6: mod_base = OTHER; note = 2'-deoxy-2'-fluorouridine-3'-phosphate
  modified_base 7: mod_base = OTHER; note = 2'-O-methyluridine-3'-phosphate
  modified_base 8: mod_base = OTHER; note = 2'-deoxy-2'-fluorouridine-3'-phosphate
  modified_base 9: mod_base = OTHER; note = 2'-O-methylguanosine-3'-phosphate
  modified_base 10: mod_base = OTHER; note = 2'-deoxy-2'-fluorocytidine-3'-phosphate
  modified_base 11: mod_base = OTHER; note = 2'-O-methylcytidine-3'-phosphate
  modified_base 12: mod_base = OTHER; note = 2'-O-methyluridine-3'-phosphate
  modified_base 13: mod_base = OTHER; note = 2'-O-methylcytidine-3'-phosphate
  modified_base 14: mod_base = OTHER; note = 2'-deoxy-2'-fluoroadenosine-3'-phosphate
  modified_base 15: mod_base = OTHER; note = 2'-O-methylguanosine-3'-phosphate
  modified_base 16: mod_base = OTHER; note = 2'-deoxy-2'-fluorouridine-3'-phosphate
  modified_base 17: mod_base = OTHER; note = 2'-O-methyluridine-3'-phosphate
  modified_base 18: mod_base = OTHER; note = 2'-deoxy-2'-fluorocytidine-3'-phosphate
  modified_base 19: mod_base = OTHER; note = 2'-O-methyladenosine-3'-phosphate
  modified_base 20: mod_base = OTHER; note = 2'-deoxy-2'-fluorouridine-3'-phosphate
  modified_base 21: mod_base = OTHER; note = 2'-O-methyluridine-3'-phosphorothioate
  modified_base 22: mod_base = OTHER; note = 2'-deoxy-2'-fluorocytidine-3'-phosphorothioate
  modified_base 23: mod_base = OTHER; note = 2'-O-methyladenosine
ttaaatttgcctcagttcattca

SEQ ID NO: 1190 - RNA, 23 nt, synthetic construct
  source 1..23: mol_type = other RNA
  modified_base 1: mod_base = OTHER; note = 2'-O-methyladenosine-3'-phosphate
  modified_base 2: mod_base = OTHER; note = 2'-deoxy-2'-fluorouridine-3'-phosphate
  modified_base 3: mod_base = OTHER; note = 2'-O-methyluridine-3'-phosphate
  modified_base 4: mod_base = OTHER; note = 2'-deoxy-2'-fluoroguanosine-3'-phosphate
  modified_base 5: mod_base = OTHER; note = 2'-O-methylcytidine-3'-phosphate
  modified_base 6: mod_base = OTHER; note = 2'-deoxy-2'-fluorocytidine-3'-phosphate
  modified_base 7: mod_base = OTHER; note = 2'-O-methyluridine-3'-phosphate
  modified_base 8: mod_base = OTHER; note = 2'-deoxy-2'-fluorouridine-3'-phosphate
  modified_base 9: mod_base = OTHER; note = 2'-O-methyluridine-3'-phosphate
  modified_base 10: mod_base = OTHER; note = 2'-deoxy-2'-fluorouridine-3'-phosphate
  modified_base 11: mod_base = OTHER; note = 2'-O-methyladenosine-3'-phosphate
  modified_base 12: mod_base = OTHER; note = 2'-O-methyladenosine-3'-phosphate
  modified_base 13: mod_base = OTHER; note = 2'-O-methyladenosine-3'-phosphate
  modified_base 14: mod_base = OTHER; note = 2'-deoxy-2'-fluorouridine-3'-phosphate
  modified_base 15: mod_base = OTHER; note = 2'-O-methyluridine-3'-phosphate
  modified_base 16: mod_base = OTHER; note = 2'-deoxy-2'-fluorouridine-3'-phosphate
  modified_base 17: mod_base = OTHER; note = 2'-O-methylguanosine-3'-phosphate
  modified_base 18: mod_base = OTHER; note = 2'-deoxy-2'-fluorocytidine-3'-phosphate
  modified_base 19: mod_base = OTHER; note = 2'-O-methylcytidine-3'-phosphate
  modified_base 20: mod_base = OTHER; note = 2'-deoxy-2'-fluorouridine-3'-phosphate
  modified_base 21: mod_base = OTHER; note = 2'-O-methylcytidine-3'-phosphorothioate
  modified_base 22: mod_base = OTHER; note = 2'-deoxy-2'-fluoroadenosine-3'-phosphorothioate
  modified_base 23: mod_base = OTHER; note = 2'-O-methylguanosine
attgccttttaaatttgcctcag

SEQ ID NO: 1191 - RNA, 23 nt, synthetic construct
  source 1..23: mol_type = other RNA
  modified_base 1: mod_base = OTHER; note = 2'-O-methyluridine-3'-phosphate
  modified_base 2: mod_base = OTHER; note = 2'-deoxy-2'-fluoroadenosine-3'-phosphate
  modified_base 3: mod_base = OTHER; note = 2'-O-methyluridine-3'-phosphate
  modified_base 4: mod_base = OTHER; note = 2'-deoxy-2'-fluorouridine-3'-phosphate
  modified_base 5: mod_base = OTHER; note = 2'-O-methyladenosine-3'-phosphate
  modified_base 6: mod_base = OTHER; note = 2'-deoxy-2'-fluorocytidine-3'-phosphate
  modified_base 7: mod_base = OTHER; note = 2'-O-methyladenosine-3'-phosphate
  modified_base 8: mod_base = OTHER; note = 2'-deoxy-2'-fluoroguanosine-3'-phosphate
  modified_base 9: mod_base = OTHER; note = 2'-O-methyladenosine-3'-phosphate
  modified_base 10: mod_base = OTHER; note = 2'-deoxy-2'-fluorouridine-3'-phosphate
  modified_base 11: mod_base = OTHER; note = 2'-O-methyluridine-3'-phosphate
  modified_base 12: mod_base = OTHER; note = 2'-O-methyluridine-3'-phosphate
  modified_base 13: mod_base = OTHER; note = 2'-O-methyluridine-3'-phosphate
  modified_base 14: mod_base = OTHER; note = 2'-deoxy-2'-fluorouridine-3'-phosphate
  modified_base 15: mod_base = OTHER; note = 2'-O-methyladenosine-3'-phosphate
  modified_base 16: mod_base = OTHER; note = 2'-deoxy-2'-fluorocytidine-3'-phosphate
  modified_base 17: mod_base = OTHER; note = 2'-O-methyladenosine-3'-phosphate
  modified_base 18: mod_base = OTHER; note = 2'-deoxy-2'-fluorocytidine-3'-phosphate
  modified_base 19: mod_base = OTHER; note = 2'-O-methyladenosine-3'-phosphate
  modified_base 20: mod_base = OTHER; note = 2'-deoxy-2'-fluorouridine-3'-phosphate
  modified_base 21: mod_base = OTHER; note = 2'-O-methyladenosine-3'-phosphorothioate
  modified_base 22: mod_base = OTHER; note = 2'-deoxy-2'-fluorocytidine-3'-phosphorothioate
  modified_base 23: mod_base = OTHER; note = 2'-O-methyluridine
tattacagatttttacacatact

SEQ ID NO: 1192 - RNA, 23 nt, synthetic construct
  source 1..23: mol_type = other RNA
  modified_base 1: mod_base = OTHER; note = 2'-O-methyluridine-3'-phosphate
  modified_base 2: mod_base = OTHER; note = 2'-deoxy-2'-fluoroadenosine-3'-phosphate
  modified_base 3: mod_base = OTHER; note = 2'-O-methylguanosine-3'-phosphate
  modified_base 4: mod_base = OTHER; note = 2'-deoxy-2'-fluoroadenosine-3'-phosphate
  modified_base 5: mod_base = OTHER; note = 2'-O-methyladenosine-3'-phosphate
  modified_base 6: mod_base = OTHER; note = 2'-deoxy-2'-fluoroadenosine-3'-phosphate
  modified_base 7: mod_base = OTHER; note = 2'-O-methyladenosine-3'-phosphate
  modified_base 8: mod_base = OTHER; note = 2'-deoxy-2'-fluorocytidine-3'-phosphate
  modified_base 9: mod_base = OTHER; note = 2'-O-methyladenosine-3'-phosphate
  modified_base 10: mod_base = OTHER; note = 2'-deoxy-2'-fluorocytidine-3'-phosphate
  modified_base 11: mod_base = OTHER; note = 2'-O-methylcytidine-3'-phosphate
  modified_base 12: mod_base = OTHER; note = 2'-O-methyladenosine-3'-phosphate
  modified_base 13: mod_base = OTHER; note = 2'-O-methyladenosine-3'-phosphate
  modified_base 14: mod_base = OTHER; note = 2'-deoxy-2'-fluoroadenosine-3'-phosphate
  modified_base 15: mod_base = OTHER; note = 2'-O-methyluridine-3'-phosphate
  modified_base 16: mod_base = OTHER; note = 2'-deoxy-2'-fluorocytidine-3'-phosphate
  modified_base 17: mod_base = OTHER; note = 2'-O-methyluridine-3'-phosphate
  modified_base 18: mod_base = OTHER; note = 2'-deoxy-2'-fluorouridine-3'-phosphate
  modified_base 19: mod_base = OTHER; note = 2'-O-methyluridine-3'-phosphate
  modified_base 20: mod_base = OTHER; note = 2'-deoxy-2'-fluoroguanosine-3'-phosphate
  modified_base 21: mod_base = OTHER; note = 2'-O-methyluridine-3'-phosphorothioate
  modified_base 22: mod_base = OTHER; note = 2'-deoxy-2'-fluorouridine-3'-phosphorothioate
  modified_base 23: mod_base = OTHER; note = 2'-O-methyluridine
tagaaaacaccaaatctttgttt

SEQ ID NO: 1193 - RNA, 23 nt, synthetic construct
  source 1..23: mol_type = other RNA
  modified_base 1: mod_base = OTHER; note = 2'-O-methyladenosine-3'-phosphate
  modified_base 2: mod_base = OTHER; note = 2'-deoxy-2'-fluorouridine-3'-phosphate
  modified_base 3: mod_base = OTHER; note = 2'-O-methyluridine-3'-phosphate
  modified_base 4: mod_base = OTHER; note = 2'-deoxy-2'-fluorouridine-3'-phosphate
  modified_base 5: mod_base = OTHER; note = 2'-O-methyladenosine-3'-phosphate
  modified_base 6: mod_base = OTHER; note = 2'-deoxy-2'-fluoroguanosine-3'-phosphate
  modified_base 7: mod_base = OTHER; note = 2'-O-methylguanosine-3'-phosphate
  modified_base 8: mod_base = OTHER; note = 2'-deoxy-2'-fluorouridine-3'-phosphate
  modified_base 9: mod_base = OTHER; note = 2'-O-methyluridine-3'-phosphate
  modified_base 10: mod_base = OTHER; note = 2'-deoxy-2'-fluoroguanosine-3'-phosphate
  modified_base 11: mod_base = OTHER; note = 2'-O-methyluridine-3'-phosphate
  modified_base 12: mod_base = OTHER; note = 2'-O-methyluridine-3'-phosphate
  modified_base 13: mod_base = OTHER; note = 2'-O-methyluridine-3'-phosphate
  modified_base 14: mod_base = OTHER; note = 2'-deoxy-2'-fluorouridine-3'-phosphate
  modified_base 15: mod_base = OTHER; note = 2'-O-methylcytidine-3'-phosphate
  modified_base 16: mod_base = OTHER; note = 2'-deoxy-2'-fluorouridine-3'-phosphate
  modified_base 17: mod_base = OTHER; note = 2'-O-methylcytidine-3'-phosphate
  modified_base 18: mod_base = OTHER; note = 2'-deoxy-2'-fluorocytidine-3'-phosphate
  modified_base 19: mod_base = OTHER; note = 2'-O-methyladenosine-3'-phosphate
  modified_base 20: mod_base = OTHER; note = 2'-deoxy-2'-fluorocytidine-3'-phosphate
  modified_base 21: mod_base = OTHER; note = 2'-O-methyladenosine-3'-phosphorothioate
  modified_base 22: mod_base = OTHER; note = 2'-deoxy-2'-fluorocytidine-3'-phosphorothioate
  modified_base 23: mod_base = OTHER; note = 2'-O-methyluridine
atttaggttgttttctccacact

SEQ ID NO: 1194 - RNA, 23 nt, synthetic construct
  source 1..23: mol_type = other RNA
  modified_base 1: mod_base = OTHER; note = 2'-O-methyluridine-3'-phosphate
  modified_base 2: mod_base = OTHER; note = 2'-deoxy-2'-fluorouridine-3'-phosphate
  modified_base 3: mod_base = OTHER; note = 2'-O-methyluridine-3'-phosphate
  modified_base 4: mod_base = OTHER; note = 2'-deoxy-2'-fluoroadenosine-3'-phosphate
  modified_base 5: mod_base = OTHER; note = 2'-O-methyluridine-3'-phosphate
  modified_base 6: mod_base = OTHER; note = 2'-deoxy-2'-fluoroadenosine-3'-phosphate
  modified_base 7: mod_base = OTHER; note = 2'-O-methylguanosine-3'-phosphate
  modified_base 8: mod_base = OTHER; note = 2'-deoxy-2'-fluoroadenosine-3'-phosphate
  modified_base 9: mod_base = OTHER; note = 2'-O-methylguanosine-3'-phosphate
  modified_base 10: mod_base = OTHER; note = 2'-deoxy-2'-fluorouridine-3'-phosphate
  modified_base 11: mod_base = OTHER; note = 2'-O-methyladenosine-3'-phosphate
  modified_base 12: mod_base = OTHER; note = 2'-O-methyluridine-3'-phosphate
  modified_base 13: mod_base = OTHER; note = 2'-O-methyladenosine-3'-phosphate
  modified_base 14: mod_base = OTHER; note = 2'-deoxy-2'-fluoroadenosine-3'-phosphate
  modified_base 15: mod_base = OTHER; note = 2'-O-methylcytidine-3'-phosphate
  modified_base 16: mod_base = OTHER; note = 2'-deoxy-2'-fluorocytidine-3'-phosphate
  modified_base 17: mod_base = OTHER; note = 2'-O-methyluridine-3'-phosphate
  modified_base 18: mod_base = OTHER; note = 2'-deoxy-2'-fluorouridine-3'-phosphate
  modified_base 19: mod_base = OTHER; note = 2'-O-methylcytidine-3'-phosphate
  modified_base 20: mod_base = OTHER; note = 2'-deoxy-2'-fluorocytidine-3'-phosphate
  modified_base 21: mod_base = OTHER; note = 2'-O-methyladenosine-3'-phosphorothioate
  modified_base 22: mod_base = OTHER; note = 2'-deoxy-2'-fluorouridine-3'-phosphorothioate
  modified_base 23: mod_base = OTHER; note = 2'-O-methyluridine
tttatagagtataaccttccatt

SEQ ID NO: 1195 - RNA, 23 nt, synthetic construct
  source 1..23: mol_type = other RNA
  modified_base 1: mod_base = OTHER; note = 2'-O-methyluridine-3'-phosphate
  modified_base 2: mod_base = OTHER; note = 2'-deoxy-2'-fluorouridine-3'-phosphate
  modified_base 3: mod_base = OTHER; note = 2'-O-methyluridine-3'-phosphate
  modified_base 4: mod_base = OTHER; note = 2'-deoxy-2'-fluoroadenosine-3'-phosphate
  modified_base 5: mod_base = OTHER; note = 2'-O-methyladenosine-3'-phosphate
  modified_base 6: mod_base = OTHER; note = 2'-deoxy-2'-fluoroadenosine-3'-phosphate
  modified_base 7: mod_base = OTHER; note = 2'-O-methyluridine-3'-phosphate
  modified_base 8: mod_base = OTHER; note = 2'-deoxy-2'-fluorouridine-3'-phosphate
  modified_base 9: mod_base = OTHER; note = 2'-O-methyluridine-3'-phosphate
  modified_base 10: mod_base = OTHER; note = 2'-deoxy-2'-fluoroguanosine-3'-phosphate
  modified_base 11: mod_base = OTHER; note = 2'-O-methylcytidine-3'-phosphate
  modified_base 12: mod_base = OTHER; note = 2'-O-methylcytidine-3'-phosphate
  modified_base 13: mod_base = OTHER; note = 2'-O-methyluridine-3'-phosphate
  modified_base 14: mod_base = OTHER; note = 2'-deoxy-2'-fluorocytidine-3'-phosphate
  modified_base 15: mod_base = OTHER; note = 2'-O-methyladenosine-3'-phosphate
  modified_base 16: mod_base = OTHER; note = 2'-deoxy-2'-fluoroguanosine-3'-phosphate
  modified_base 17: mod_base = OTHER; note = 2'-O-methyluridine-3'-phosphate
  modified_base 18: mod_base = OTHER; note = 2'-deoxy-2'-fluorouridine-3'-phosphate
  modified_base 19: mod_base = OTHER; note = 2'-O-methylcytidine-3'-phosphate
  modified_base 20: mod_base = OTHER; note = 2'-deoxy-2'-fluoroadenosine-3'-phosphate
  modified_base 21: mod_base = OTHER; note = 2'-O-methyluridine-3'-phosphorothioate
  modified_base 22: mod_base = OTHER; note = 2'-deoxy-2'-fluorouridine-3'-phosphorothioate
  modified_base 23: mod_base = OTHER; note = 2'-O-methylcytidine
tttaaatttgcctcagttcattc

SEQ ID NO: 1196 - RNA, 23 nt, synthetic construct
  source 1..23: mol_type = other RNA
  modified_base 1: mod_base = OTHER; note = 2'-O-methyluridine-3'-phosphate
  modified_base 2: mod_base = OTHER; note = 2'-deoxy-2'-fluoroadenosine-3'-phosphate
  modified_base 3: mod_base = OTHER; note = 2'-O-methyluridine-3'-phosphate
  modified_base 4: mod_base = OTHER; note = 2'-deoxy-2'-fluorouridine-3'-phosphate
  modified_base 5: mod_base = OTHER; note = 2'-O-methylguanosine-3'-phosphate
  modified_base 6: mod_base = OTHER; note = 2'-deoxy-2'-fluorocytidine-3'-phosphate
  modified_base 7: mod_base = OTHER; note = 2'-O-methylcytidine-3'-phosphate
  modified_base 8: mod_base = OTHER; note = 2'-deoxy-2'-fluorouridine-3'-phosphate
  modified_base 9: mod_base = OTHER; note = 2'-O-methyluridine-3'-phosphate
  modified_base 10: mod_base = OTHER; note = 2'-deoxy-2'-fluorouridine-3'-phosphate
  modified_base 11: mod_base = OTHER; note = 2'-O-methyluridine-3'-phosphate
  modified_base 12: mod_base = OTHER; note = 2'-O-methyladenosine-3'-phosphate
  modified_base 13: mod_base = OTHER; note = 2'-O-methyladenosine-3'-phosphate
  modified_base 14: mod_base = OTHER; note = 2'-deoxy-2'-fluoroadenosine-3'-phosphate
  modified_base 15: mod_base = OTHER; note = 2'-O-methyluridine-3'-phosphate
  modified_base 16: mod_base = OTHER; note = 2'-deoxy-2'-fluorouridine-3'-phosphate
  modified_base 17: mod_base = OTHER; note = 2'-O-methyluridine-3'-phosphate
  modified_base 18: mod_base = OTHER; note = 2'-deoxy-2'-fluoroguanosine-3'-phosphate
  modified_base 19: mod_base = OTHER; note = 2'-O-methylcytidine-3'-phosphate
  modified_base 20: mod_base = OTHER; note = 2'-deoxy-2'-fluorocytidine-3'-phosphate
  modified_base 21: mod_base = OTHER; note = 2'-O-methyluridine-3'-phosphorothioate
  modified_base 22: mod_base = OTHER; note = 2'-deoxy-2'-fluorocytidine-3'-phosphorothioate
  modified_base 23: mod_base = OTHER; note = 2'-O-methyladenosine
tattgccttttaaatttgcctca

SEQ ID NO: 1197 - RNA, 23 nt, synthetic construct
  source 1..23: mol_type = other RNA
  modified_base 1: mod_base = OTHER; note = 2'-O-methyladenosine-3'-phosphate
  modified_base 2: mod_base = OTHER; note = 2'-deoxy-2'-fluoroadenosine-3'-phosphate
  modified_base 3: mod_base = OTHER; note = 2'-O-methylguanosine-3'-phosphate
  modified_base 4: mod_base = OTHER; note = 2'-deoxy-2'-fluorouridine-3'-phosphate
  modified_base 5: mod_base = OTHER; note = 2'-O-methyladenosine-3'-phosphate
  modified_base 6: mod_base = OTHER; note = 2'-deoxy-2'-fluoroguanosine-3'-phosphate
  modified_base 7: mod_base = OTHER; note = 2'-O-methyladenosine-3'-phosphate
  modified_base 8: mod_base = OTHER; note = 2'-deoxy-2'-fluoroadenosine-3'-phosphate
  modified_base 9: mod_base = OTHER; note = 2'-O-methyladenosine-3'-phosphate
  modified_base 10: mod_base = OTHER; note = 2'-deoxy-2'-fluoroadenosine-3'-phosphate
  modified_base 11: mod_base = OTHER; note = 2'-O-methylcytidine-3'-phosphate
  modified_base 12: mod_base = OTHER; note = 2'-O-methyladenosine-3'-phosphate
  modified_base 13: mod_base = OTHER; note = 2'-O-methylcytidine-3'-phosphate
  modified_base 14: mod_base = OTHER; note = 2'-deoxy-2'-fluorocytidine-3'-phosphate
  modified_base 15: mod_base = OTHER; note = 2'-O-methyladenosine-3'-phosphate
  modified_base 16: mod_base = OTHER; note = 2'-deoxy-2'-fluoroadenosine-3'-phosphate
  modified_base 17: mod_base = OTHER; note = 2'-O-methyladenosine-3'-phosphate
  modified_base 18: mod_base = OTHER; note = 2'-deoxy-2'-fluorouridine-3'-phosphate
  modified_base 19: mod_base = OTHER; note = 2'-O-methylcytidine-3'-phosphate
  modified_base 20: mod_base = OTHER; note = 2'-deoxy-2'-fluorouridine-3'-phosphate
  modified_base 21: mod_base = OTHER; note = 2'-O-methyluridine-3'-phosphorothioate
  modified_base 22: mod_base = OTHER; note = 2'-deoxy-2'-fluorouridine-3'-phosphorothioate
  modified_base 23: mod_base = OTHER; note = 2'-O-methylguanosine
aagtagaaaacaccaaatctttg

SEQ ID NO: 1198 - RNA, 23 nt, synthetic construct
  source 1..23: mol_type = other RNA
  modified_base 1: mod_base = OTHER; note = 2'-O-methyluridine-3'-phosphate
  modified_base 2: mod_base = OTHER; note = 2'-deoxy-2'-fluoroadenosine-3'-phosphate
  modified_base 3: mod_base = OTHER; note = 2'-O-methyluridine-3'-phosphate
  modified_base 4: mod_base = OTHER; note = 2'-deoxy-2'-fluorouridine-3'-phosphate
  modified_base 5: mod_base = OTHER; note = 2'-O-methyluridine-3'-phosphate
  modified_base 6: mod_base = OTHER; note = 2'-deoxy-2'-fluoroadenosine-3'-phosphate
  modified_base 7: mod_base = OTHER; note = 2'-O-methylcytidine-3'-phosphate
  modified_base 8: mod_base = OTHER; note = 2'-deoxy-2'-fluorocytidine-3'-phosphate
  modified_base 9: mod_base = OTHER; note = 2'-O-methyladenosine-3'-phosphate
  modified_base 10: mod_base = OTHER; note = 2'-deoxy-2'-fluorouridine-3'-phosphate
  modified_base 11: mod_base = OTHER; note = 2'-O-methyluridine-3'-phosphate
  modified_base 12: mod_base = OTHER; note = 2'-O-methyluridine-3'-phosphate
  modified_base 13: mod_base = OTHER; note = 2'-O-methyladenosine-3'-phosphate
  modified_base 14: mod_base = OTHER; note = 2'-deoxy-2'-fluoroguanosine-3'-phosphate
  modified_base 15: mod_base = OTHER; note = 2'-O-methylguanosine-3'-phosphate
  modified_base 16: mod_base = OTHER; note = 2'-deoxy-2'-fluorouridine-3'-phosphate
  modified_base 17: mod_base = OTHER; note = 2'-O-methyluridine-3'-phosphate
  modified_base 18: mod_base = OTHER; note = 2'-deoxy-2'-fluoroguanosine-3'-phosphate
  modified_base 19: mod_base = OTHER; note = 2'-O-methyluridine-3'-phosphate
  modified_base 20: mod_base = OTHER; note = 2'-deoxy-2'-fluorouridine-3'-phosphate
  modified_base 21: mod_base = OTHER; note = 2'-O-methyluridine-3'-phosphorothioate
  modified_base 22: mod_base = OTHER; note = 2'-deoxy-2'-fluorouridine-3'-phosphorothioate
  modified_base 23: mod_base = OTHER; note = 2'-O-methylcytidine
tatttaccatttaggttgttttc

SEQ ID NO: 1199 - RNA, 23 nt, synthetic construct
  source 1..23: mol_type = other RNA
  modified_base 1: mod_base = OTHER; note = 2'-O-methyluridine-3'-phosphate
  modified_base 2: mod_base = OTHER; note = 2'-deoxy-2'-fluorouridine-3'-phosphate
  modified_base 3: mod_base = OTHER; note = 2'-O-methylguanosine-3'-phosphate
  modified_base 4: mod_base = OTHER; note = 2'-deoxy-2'-fluoroguanosine-3'-phosphate
  modified_base 5: mod_base = OTHER; note = 2'-O-methyluridine-3'-phosphate
  modified_base 6: mod_base = OTHER; note = 2'-deoxy-2'-fluorouridine-3'-phosphate
  modified_base 7: mod_base = OTHER; note = 2'-O-methylguanosine-3'-phosphate
  modified_base 8: mod_base = OTHER; note = 2'-deoxy-2'-fluoroadenosine-3'-phosphate
  modified_base 9: mod_base = OTHER; note = 2'-O-methyluridine-3'-phosphate
  modified_base 10: mod_base = OTHER; note = 2'-deoxy-2'-fluorouridine-3'-phosphate
  modified_base 11: mod_base = OTHER; note = 2'-O-methyluridine-3'-phosphate
  modified_base 12: mod_base = OTHER; note = 2'-O-methyluridine-3'-phosphate
  modified_base 13: mod_base = OTHER; note = 2'-O-methyladenosine-3'-phosphate
  modified_base 14: mod_base = OTHER; note = 2'-deoxy-2'-fluorouridine-3'-phosphate
  modified_base 15: mod_base = OTHER; note = 2'-O-methyladenosine-3'-phosphate
  modified_base 16: mod_base = OTHER; note = 2'-deoxy-2'-fluoroguanosine-3'-phosphate
  modified_base 17: mod_base = OTHER; note = 2'-O-methyladenosine-3'-phosphate
  modified_base 18: mod_base = OTHER; note = 2'-deoxy-2'-fluoroguanosine-3'-phosphate
  modified_base 19: mod_base = OTHER; note = 2'-O-methyluridine-3'-phosphate
  modified_base 20: mod_base = OTHER; note = 2'-deoxy-2'-fluoroadenosine-3'-phosphate
  modified_base 21: mod_base = OTHER; note = 2'-O-methyluridine-3'-phosphorothioate
  modified_base 22: mod_base = OTHER; note = 2'-deoxy-2'-fluoroadenosine-3'-phosphorothioate
  modified_base 23: mod_base = OTHER; note = 2'-O-methyladenosine
ttggttgattttatagagtataa

SEQ ID NO: 1200 - RNA, 23 nt, synthetic construct
  source 1..23: mol_type = other RNA
  modified_base 1: mod_base = OTHER; note = 2'-O-methyluridine-3'-phosphate
  modified_base 2: mod_base = OTHER; note = 2'-deoxy-2'-fluorouridine-3'-phosphate
  modified_base 3: mod_base = OTHER; note = 2'-O-methyluridine-3'-phosphate
  modified_base 4: mod_base = OTHER; note = 2'-deoxy-2'-fluorouridine-3'-phosphate
  modified_base 5: mod_base = OTHER; note = 2'-O-methyladenosine-3'-phosphate
  modified_base 6: mod_base = OTHER; note = 2'-deoxy-2'-fluoroadenosine-3'-phosphate
  modified_base 7: mod_base = OTHER; note = 2'-O-methyladenosine-3'-phosphate
  modified_base 8: mod_base = OTHER; note = 2'-deoxy-2'-fluorouridine-3'-phosphate
  modified_base 9: mod_base = OTHER; note = 2'-O-methyluridine-3'-phosphate
  modified_base 10: mod_base = OTHER; note = 2'-deoxy-2'-fluorouridine-3'-phosphate
  modified_base 11: mod_base = OTHER; note = 2'-O-methylguanosine-3'-phosphate
  modified_base 12: mod_base = OTHER; note = 2'-O-methylcytidine-3'-phosphate
  modified_base 13: mod_base = OTHER; note = 2'-O-methylcytidine-3'-phosphate
  modified_base 14: mod_base = OTHER; note = 2'-deoxy-2'-fluorouridine-3'-phosphate
  modified_base 15: mod_base = OTHER; note = 2'-O-methylcytidine-3'-phosphate
  modified_base 16: mod_base = OTHER; note = 2'-deoxy-2'-fluoroadenosine-3'-phosphate
  modified_base 17: mod_base = OTHER; note = 2'-O-methylguanosine-3'-phosphate
  modified_base 18: mod_base = OTHER; note = 2'-deoxy-2'-fluorouridine-3'-phosphate
  modified_base 19: mod_base = OTHER; note = 2'-O-methyluridine-3'-phosphate
  modified_base 20: mod_base = OTHER; note = 2'-deoxy-2'-fluorocytidine-3'-phosphate
  modified_base 21: mod_base = OTHER; note = 2'-O-methyladenosine-3'-phosphorothioate
  modified_base 22: mod_base = OTHER; note = 2'-deoxy-2'-fluorouridine-3'-phosphorothioate
  modified_base 23: mod_base = OTHER; note = 2'-O-methyluridine
ttttaaatttgcctcagttcatt

SEQ ID NO: 1201 - RNA, 23 nt, synthetic construct
  source 1..23: mol_type = other RNA
  modified_base 1: mod_base = OTHER; note = 2'-O-methyluridine-3'-phosphate
  modified_base 2: mod_base = OTHER; note = 2'-deoxy-2'-fluorouridine-3'-phosphate
  modified_base 3: mod_base = OTHER; note = 2'-O-methyladenosine-3'-phosphate
  modified_base 4: mod_base = OTHER; note = 2'-deoxy-2'-fluorouridine-3'-phosphate
  modified_base 5: mod_base = OTHER; note = 2'-O-methyluridine-3'-phosphate
  modified_base 6: mod_base = OTHER; note = 2'-deoxy-2'-fluoroguanosine-3'-phosphate
  modified_base 7: mod_base = OTHER; note = 2'-O-methylcytidine-3'-phosphate
  modified_base 8: mod_base = OTHER; note = 2'-deoxy-2'-fluorocytidine-3'-phosphate
  modified_base 9: mod_base = OTHER; note = 2'-O-methyluridine-3'-phosphate
  modified_base 10: mod_base = OTHER; note = 2'-deoxy-2'-fluorouridine-3'-phosphate
  modified_base 11: mod_base = OTHER; note = 2'-O-methyluridine-3'-phosphate
  modified_base 12: mod_base = OTHER; note = 2'-O-methyluridine-3'-phosphate
  modified_base 13: mod_base = OTHER; note = 2'-O-methyladenosine-3'-phosphate
  modified_base 14: mod_base = OTHER; note = 2'-deoxy-2'-fluoroadenosine-3'-phosphate
  modified_base 15: mod_base = OTHER; note = 2'-O-methyladenosine-3'-phosphate
  modified_base 16: mod_base = OTHER; note = 2'-deoxy-2'-fluorouridine-3'-phosphate
  modified_base 17: mod_base = OTHER; note = 2'-O-methyluridine-3'-phosphate
  modified_base 18: mod_base = OTHER; note = 2'-deoxy-2'-fluorouridine-3'-phosphate
  modified_base 19: mod_base = OTHER; note = 2'-O-methylguanosine-3'-phosphate
  modified_base 20: mod_base = OTHER; note = 2'-deoxy-2'-fluorocytidine-3'-phosphate
  modified_base 21: mod_base = OTHER; note = 2'-O-methylcytidine-3'-phosphorothioate
  modified_base 22: mod_base = OTHER; note = 2'-deoxy-2'-fluorouridine-3'-phosphorothioate
  modified_base 23: mod_base = OTHER; note = 2'-O-methylcytidine
ttattgccttttaaatttgcctc

SEQ ID NO: 1202 - RNA, 23 nt, synthetic construct
  source 1..23: mol_type = other RNA
  modified_base 1: mod_base = OTHER; note = 2'-O-methyluridine-3'-phosphate
  modified_base 2: mod_base = OTHER; note = 2'-deoxy-2'-fluorouridine-3'-phosphate
  modified_base 3: mod_base = OTHER; note = 2'-O-methyluridine-3'-phosphate
  modified_base 4: mod_base = OTHER; note = 2'-deoxy-2'-fluoroguanosine-3'-phosphate
  modified_base 5: mod_base = OTHER; note = 2'-O-methyluridine-3'-phosphate
  modified_base 6: mod_base = OTHER; note = 2'-deoxy-2'-fluoroguanosine-3'-phosphate
  modified_base 7: mod_base = OTHER; note = 2'-O-methyladenosine-3'-phosphate
  modified_base 8: mod_base = OTHER; note = 2'-deoxy-2'-fluorouridine-3'-phosphate
  modified_base 9: mod_base = OTHER; note = 2'-O-methylcytidine-3'-phosphate
  modified_base 10: mod_base = OTHER; note = 2'-deoxy-2'-fluorocytidine-3'-phosphate
  modified_base 11: mod_base = OTHER; note = 2'-O-methylcytidine-3'-phosphate
  modified_base 12: mod_base = OTHER; note = 2'-O-methyladenosine-3'-phosphate
  modified_base 13: mod_base = OTHER; note = 2'-O-methyladenosine-3'-phosphate
  modified_base 14: mod_base = OTHER; note = 2'-deoxy-2'-fluoroguanosine-3'-phosphate
  modified_base 15: mod_base = OTHER; note = 2'-O-methyluridine-3'-phosphate
  modified_base 16: mod_base = OTHER; note = 2'-deoxy-2'-fluoroadenosine-3'-phosphate
  modified_base 17: mod_base = OTHER; note = 2'-O-methylguanosine-3'-phosphate
  modified_base 18: mod_base = OTHER; note = 2'-deoxy-2'-fluoroadenosine-3'-phosphate
  modified_base 19: mod_base = OTHER; note = 2'-O-methyladenosine-3'-phosphate
  modified_base 20: mod_base = OTHER; note = 2'-deoxy-2'-fluoroadenosine-3'-phosphate
  modified_base 21: mod_base = OTHER; note = 2'-O-methyladenosine-3'-phosphorothioate
  modified_base 22: mod_base = OTHER; note = 2'-deoxy-2'-fluorocytidine-3'-phosphorothioate
  modified_base 23: mod_base = OTHER; note = 2'-O-methyladenosine
tttgtgatcccaagtagaaaaca

SEQ ID NO: 1203 - RNA, 23 nt, synthetic construct
  source 1..23: mol_type = other RNA
  modified_base 1: mod_base = OTHER; note = 2'-O-methyladenosine-3'-phosphate
  modified_base 2: mod_base = OTHER; note = 2'-deoxy-2'-fluorouridine-3'-phosphate
  modified_base 3: mod_base = OTHER; note = 2'-O-methyladenosine-3'-phosphate
  modified_base 4: mod_base = OTHER; note = 2'-deoxy-2'-fluorouridine-3'-phosphate
  modified_base 5: mod_base = OTHER; note = 2'-O-methyluridine-3'-phosphate
  modified_base 6: mod_base = OTHER; note = 2'-deoxy-2'-fluorouridine-3'-phosphate
  modified_base 7: mod_base = OTHER; note = 2'-O-methyladenosine-3'-phosphate
  modified_base 8: mod_base = OTHER; note = 2'-deoxy-2'-fluorocytidine-3'-phosphate
  modified_base 9: mod_base = OTHER; note = 2'-O-methylcytidine-3'-phosphate
  modified_base 10: mod_base = OTHER; note = 2'-deoxy-2'-fluoroadenosine-3'-phosphate
  modified_base 11: mod_base = OTHER; note = 2'-O-methyluridine-3'-phosphate
  modified_base 12: mod_base = OTHER; note = 2'-O-methyluridine-3'-phosphate
  modified_base 13: mod_base = OTHER; note = 2'-O-methyluridine-3'-phosphate
  modified_base 14: mod_base = OTHER; note = 2'-deoxy-2'-fluoroadenosine-3'-phosphate
  modified_base 15: mod_base = OTHER; note = 2'-O-methylguanosine-3'-phosphate
  modified_base 16: mod_base = OTHER; note = 2'-deoxy-2'-fluoroguanosine-3'-phosphate
  modified_base 17: mod_base = OTHER; note = 2'-O-methyluridine-3'-phosphate
  modified_base 18: mod_base = OTHER; note = 2'-deoxy-2'-fluorouridine-3'-phosphate
  modified_base 19: mod_base = OTHER; note = 2'-O-methylguanosine-3'-phosphate
  modified_base 20: mod_base = OTHER; note = 2'-deoxy-2'-fluorouridine-3'-phosphate
  modified_base 21: mod_base = OTHER; note = 2'-O-methyluridine-3'-phosphorothioate
  modified_base 22: mod_base = OTHER; note = 2'-deoxy-2'-fluorouridine-3'-phosphorothioate
  modified_base 23: mod_base = OTHER; note = 2'-O-methyluridine
atatttaccatttaggttgtttt

SEQ ID NO: 1204 - RNA, 23 nt, synthetic construct
  source 1..23: mol_type = other RNA
  modified_base 1: mod_base = OTHER; note = 2'-O-methyluridine-3'-phosphate
  modified_base 2: mod_base = OTHER; note = 2'-deoxy-2'-fluorouridine-3'-phosphate
  modified_base 3: mod_base = OTHER; note = 2'-O-methyluridine-3'-phosphate
  modified_base 4: mod_base = OTHER; note = 2'-deoxy-2'-fluoroguanosine-3'-phosphate
  modified_base 5: mod_base = OTHER; note = 2'-O-methylguanosine-3'-phosphate
  modified_base 6: mod_base = OTHER; note = 2'-deoxy-2'-fluorouridine-3'-phosphate
  modified_base 7: mod_base = OTHER; note = 2'-O-methyluridine-3'-phosphate
  modified_base 8: mod_base = OTHER; note = 2'-deoxy-2'-fluoroguanosine-3'-phosphate
  modified_base 9: mod_base = OTHER; note = 2'-O-methyladenosine-3'-phosphate
  modified_base 10: mod_base = OTHER; note = 2'-deoxy-2'-fluorouridine-3'-phosphate
  modified_base 11: mod_base = OTHER; note = 2'-O-methyluridine-3'-phosphate
  modified_base 12: mod_base = OTHER; note = 2'-O-methyluridine-3'-phosphate
  modified_base 13: mod_base = OTHER; note = 2'-O-methyluridine-3'-phosphate
  modified_base 14: mod_base = OTHER; note = 2'-deoxy-2'-fluoroadenosine-3'-phosphate
  modified_base 15: mod_base = OTHER; note = 2'-O-methyluridine-3'-phosphate
  modified_base 16: mod_base = OTHER; note = 2'-deoxy-2'-fluoroadenosine-3'-phosphate
  modified_base 17: mod_base = OTHER; note = 2'-O-methylguanosine-3'-phosphate
  modified_base 18: mod_base = OTHER; note = 2'-deoxy-2'-fluoroadenosine-3'-phosphate
  modified_base 19: mod_base = OTHER; note = 2'-O-methylguanosine-3'-phosphate
  modified_base 20: mod_base = OTHER; note = 2'-deoxy-2'-fluorouridine-3'-phosphate
  modified_base 21: mod_base = OTHER; note = 2'-O-methyladenosine-3'-phosphorothioate
  modified_base 22: mod_base = OTHER; note = 2'-deoxy-2'-fluorouridine-3'-phosphorothioate
  modified_base 23: mod_base = OTHER; note = 2'-O-methyladenosine
tttggttgattttatagagtata

SEQ ID NO: 1205 - RNA, 23 nt, synthetic construct
  source 1..23: mol_type = other RNA
  modified_base 1: mod_base = OTHER; note = 2'-O-methyluridine-3'-phosphate
  modified_base 2: mod_base = OTHER; note = 2'-deoxy-2'-fluorouridine-3'-phosphate
  modified_base 3: mod_base = OTHER; note = 2'-O-methyluridine-3'-phosphate
  modified_base 4: mod_base = OTHER; note = 2'-deoxy-2'-fluorouridine-3'-phosphate
  modified_base 5: mod_base = OTHER; note = 2'-O-methyluridine-3'-phosphate
  modified_base 6: mod_base = OTHER; note = 2'-deoxy-2'-fluoroadenosine-3'-phosphate
  modified_base 7: mod_base = OTHER; note = 2'-O-methyladenosine-3'-phosphate
  modified_base 8: mod_base = OTHER; note = 2'-deoxy-2'-fluoroadenosine-3'-phosphate
  modified_base 9: mod_base = OTHER; note = 2'-O-methyluridine-3'-phosphate
  modified_base 10: mod_base = OTHER; note = 2'-deoxy-2'-fluorouridine-3'-phosphate
  modified_base 11: mod_base = OTHER; note = 2'-O-methyluridine-3'-phosphate
  modified_base 12: mod_base = OTHER; note = 2'-O-methylguanosine-3'-phosphate
  modified_base 13: mod_base = OTHER; note = 2'-O-methylcytidine-3'-phosphate
  modified_base 14: mod_base = OTHER; note = 2'-deoxy-2'-fluorocytidine-3'-phosphate
  modified_base 15: mod_base = OTHER; note = 2'-O-methyluridine-3'-phosphate
  modified_base 16: mod_base = OTHER; note = 2'-deoxy-2'-fluorocytidine-3'-phosphate
  modified_base 17: mod_base = OTHER; note = 2'-O-methyladenosine-3'-phosphate
  modified_base 18: mod_base = OTHER; note = 2'-deoxy-2'-fluoroguanosine-3'-phosphate
  modified_base 19: mod_base = OTHER; note = 2'-O-methyluridine-3'-phosphate
  modified_base 20: mod_base = OTHER; note = 2'-deoxy-2'-fluorouridine-3'-phosphate
  modified_base 21: mod_base = OTHER; note = 2'-O-methylcytidine-3'-phosphorothioate
  modified_base 22: mod_base = OTHER; note = 2'-deoxy-2'-fluoroadenosine-3'-phosphorothioate
  modified_base 23: mod_base = OTHER; note = 2'-O-methyluridine
tttttaaatttgcctcagttcat

SEQ ID NO: 1206 - RNA, 23 nt, synthetic construct
  source 1..23: mol_type = other RNA
  modified_base 1: mod_base = OTHER; note = 2'-O-methyladenosine-3'-phosphate
  modified_base 2: mod_base = OTHER; note = 2'-deoxy-2'-fluoroadenosine-3'-phosphate
  modified_base 3: mod_base = OTHER; note = 2'-O-methylguanosine-3'-phosphate
  modified_base 4: mod_base = OTHER; note = 2'-deoxy-2'-fluoroadenosine-3'-phosphate
  modified_base 5: mod_base = OTHER; note = 2'-O-methyluridine-3'-phosphate
  modified_base 6: mod_base = OTHER; note = 2'-deoxy-2'-fluorouridine-3'-phosphate
  modified_base 7: mod_base = OTHER; note = 2'-O-methyluridine-3'-phosphate
  modified_base 8: mod_base = OTHER; note = 2'-deoxy-2'-fluorouridine-3'-phosphate
  modified_base 9: mod_base = OTHER; note = 2'-O-methyluridine-3'-phosphate
  modified_base 10: mod_base = OTHER; note = 2'-deoxy-2'-fluoroadenosine-3'-phosphate
  modified_base 11: mod_base = OTHER; note = 2'-O-methylcytidine-3'-phosphate
  modified_base 12: mod_base = OTHER; note = 2'-O-methyladenosine-3'-phosphate
  modified_base 13: mod_base = OTHER; note = 2'-O-methylcytidine-3'-phosphate
  modified_base 14: mod_base = OTHER; note = 2'-deoxy-2'-fluoroadenosine-3'-phosphate
  modified_base 15: mod_base = OTHER; note = 2'-O-methyluridine-3'-phosphate
  modified_base 16: mod_base = OTHER; note = 2'-deoxy-2'-fluoroadenosine-3'-phosphate
  modified_base 17: mod_base = OTHER; note = 2'-O-methylcytidine-3'-phosphate
  modified_base 18: mod_base = OTHER; note = 2'-deoxy-2'-fluorouridine-3'-phosphate
  modified_base 19: mod_base = OTHER; note = 2'-O-methylcytidine-3'-phosphate
  modified_base 20: mod_base = OTHER; note = 2'-deoxy-2'-fluorouridine-3'-phosphate
  modified_base 21: mod_base = OTHER; note = 2'-O-methylguanosine-3'-phosphorothioate
  modified_base 22: mod_base = OTHER; note = 2'-deoxy-2'-fluorouridine-3'-phosphorothioate
  modified_base 23: mod_base = OTHER; note = 2'-O-methylguanosine
aagatttttacacatactctgtg

SEQ ID NO: 1207 - DNA, 21 bp, synthetic construct
  source 1..21: mol_type = other DNA
  modified_base 1: mod_base = OTHER; note = 2'-O-methylcytidine-3'-phosphate
  modified_base 2: mod_base = OTHER; note = 2'-O-methyluridine-3'-phosphate
  modified_base 3: mod_base = OTHER; note = 2'-O-methyluridine-3'-phosphate
  modified_base 4: mod_base = OTHER; note = adenosine-3'-phosphate
  modified_base 5: mod_base = OTHER; note = 2'-O-methylcytidine-3'-phosphate
  modified_base 6: mod_base = OTHER; note = guanosine-3'-phosphate
  modified_base 7: mod_base = OTHER; note = 2'-O-methylcytidine-3'-phosphate
  modified_base 8: mod_base = OTHER; note = 2'-O-methyluridine-3'-phosphate
  modified_base 9: mod_base = OTHER; note = guanosine-3'-phosphate
  modified_base 10: mod_base = OTHER; note = adenosine-3'-phosphate
  modified_base 11: mod_base = OTHER; note = guanosine-3'-phosphate
  modified_base 12: mod_base = OTHER; note = 2'-O-methyluridine-3'-phosphate
  modified_base 13: mod_base = OTHER; note = adenosine-3'-phosphate
  modified_base 14: mod_base = OTHER; note = 2'-O-methylcytidine-3'-phosphate
  modified_base 15: mod_base = OTHER; note = 2'-O-methyluridine-3'-phosphate
  modified_base 16: mod_base = OTHER; note = 2'-O-methyluridine-3'-phosphate
  modified_base 17: mod_base = OTHER; note = 2'-O-methylcytidine-3'-phosphate
  modified_base 18: mod_base = OTHER; note = guanosine-3'-phosphate
  modified_base 19: mod_base = OTHER; note = adenosine-3'-phosphate
  modified_base 20: mod_base = OTHER; note = 2'-deoxythymidine-3'-phosphorothioate
  misc_feature 1..19: note = RNA
  misc_feature 20..21: note = DNA
cttacgctgagtacttcgatt

SEQ ID NO: 1208 - DNA, 21 bp, synthetic construct
  source 1..21: mol_type = other DNA
  modified_base 1: mod_base = OTHER; note = uridine-3'-phosphate
  modified_base 2: mod_base = OTHER; note = cytidine-3'-phosphate
  modified_base 3: mod_base = OTHER; note = guanosine-3'-phosphate
  modified_base 4: mod_base = OTHER; note = adenosine-3'-phosphate
  modified_base 5: mod_base = OTHER; note = adenosine-3'-phosphate
  modified_base 6: mod_base = OTHER; note = guanosine-3'-phosphate
  modified_base 7: mod_base = OTHER; note = 2'-O-methyluridine-3'-phosphate
  modified_base 8: mod_base = OTHER; note = adenosine-3'-phosphate
  modified_base 9: mod_base = OTHER; note = cytidine-3'-phosphate
  modified_base 10: mod_base = OTHER; note = uridine-3'-phosphate
  modified_base 11: mod_base = OTHER; note = 2'-O-methylcytidine-3'-phosphate
  modified_base 12: mod_base = OTHER; note = adenosine-3'-phosphate
  modified_base 13: mod_base = OTHER; note = guanosine-3'-phosphate
  modified_base 14: mod_base = OTHER; note = cytidine-3'-phosphate
  modified_base 15: mod_base = OTHER; note = guanosine-3'-phosphate
  modified_base 16: mod_base = OTHER; note = 2'-O-methyluridine-3'-phosphate
  modified_base 17: mod_base = OTHER; note = adenosine-3'-phosphate
  modified_base 18: mod_base = OTHER; note = adenosine-3'-phosphate
  modified_base 19: mod_base = OTHER; note = guanosine-3'-phosphate
  modified_base 20: mod_base = OTHER; note = 2'-deoxythymidine-3'-phosphorothioate
  misc_feature 1..19: note = RNA
  misc_feature 20..21: note = DNA
tcgaagtactcagcgtaagtt
